(19) United States
(12) Patent Application Publication
(10) Pub. No.: US 2007/0093969 A1
(43) Pub. Date: Apr. 26, 2007

(54) Molecular nephrotoxicology modeling

(76) Inventors: Donna L. Mendrick, Gaithersburg, MD (US); Mark W. Porter, Gaithersburg, MD (US); Kory R. Johnson, Gaithersburg, MD (US); Arthur Castle, Gaithersburg, MD (US); Brandon Higgs, Gaithersburg, MD (US); Michael Elashoff, Gaithersburg, MD (US)

Correspondence Address: COOLEY GODWARD LLP, THE BROWN BUILDING - 875 15TH STREET, NW, SUITE 800, WASHINGTON, DC, 20005-2221, US

(21) Appl. No.: 10/515,325

(22) PCT Filed: Nov. 24, 2003
(86) PCT No.: PCT/US03/37556

§ 371 Date: Sep. 16, 2005

(30) Foreign Application Priority Data
Nov. 22, 2002 (US) 10301856

(51) Int. Cl. G06F 19/00

(52) U.S. Cl. 702/20

(57) ABSTRACT

The present invention is based on the elucidation of the global changes in gene expression and the identification of toxicity markers in kidney tissues or cells exposed to a known renal toxin. The genes may be used as toxicity markers in drug screening and toxicity assays. The invention includes a database of genes characterized by toxin-induced differential expression that is designed for use with microarrays and other solid-phase probes.

### RELATED APPLICATIONS

[0001] This application is a continuation-in-part of U.S. application Ser. No. 10/301,856, filed Nov. 22, 2002, which is a continuation-in-part of U.S. application Ser. No. 10/152,319, filed May 22, 2002, which claims priority under 35 U.S.C. §119(e) to U.S. Provisional Application 60/292,335, filed May 22, 2001; 60/297,523, filed Jun. 13, 2001; 60/298,925, filed Jun. 19, 2001; 60/303,810, filed Jul. 10, 2001; 60/303,807, filed Jul. 10, 2001; 60/303,808, filed Jul. 10, 2001; 60/315,047, filed Aug. 28, 2001; 60/324,928, filed Sep. 27, 2001; 60/330,867, filed Nov. 1, 2001; 60/330,462, Oct. 22, 2001; 60/331,805, filed Nov. 21, 2001; 60/336,144, filed Dec. 6, 2001; 60/340,873, filed Dec. 19, 2001; 60/357,843, filed Feb. 21, 2002; 60/357,842, filed Feb. 21, 2002; 60/357,844, filed Feb. 21, 2002; 60/364,134 filed Mar. 15, 2002; 60/370,206, filed Apr. 8, 2002; 60/370,247, filed Apr. 8, 2002; 60/370,144, filed Apr. 8, 2002; 60/371,679, filed Apr. 12, 2002; and 60/372,794, filed Apr. 17, 2002, all of which are herein incorporated by reference in their entirety.

### SEQUENCE LISTING SUBMISSION ON COMPACT DISC

[0002] The Sequence Listing submitted concurrently herewith on compact disc under 37 C.F.R. §§1.821(c) and 1.821(e) is herein incorporated by reference in its entirety. Three copies of the Sequence Listing, one on each of three compact discs are provided. Copy 1 and Copy 2 are identical. Copies 1 and 2 are also identical to the CRF. Each electronic copy of the Sequence Listing was created on Nov. 20, 2003 with a file size of 2373 KB. The file names are as follows: Copy 1—g1508901wo.txt; Copy 2—g1508901wo.txt; CRF—g1508901wo.txt.

### BACKGROUND OF THE INVENTION

[0003] The need for methods of assessing the toxic impact of a compound, pharmaceutical agent or environmental pollutant on a cell or living organism has led to the development of procedures which utilize living organisms as biological monitors. The simplest and most convenient of these systems utilize unicellular microorganisms such as yeast and bacteria, since they are the most easily maintained and manipulated. In addition, unicellular screening systems often use easily detectable changes in phenotype to monitor the effect of test compounds on the cell. Unicellular organisms, however, are inadequate models for estimating the potential effects of many compounds on complex multicellular animals, as they do not have the ability to carry out biotransformations.

[0004] The biotransformation of chemical compounds by multicellular organisms is a significant factor in determining the overall toxicity of agents to which they are exposed. Accordingly, multicellular screening systems may be preferred or required to detect the toxic effects of compounds. The use of multicellular organisms as toxicology screening tools has been significantly hampered, however, by the lack of convenient screening mechanisms or endpoints, such as those available in yeast or bacterial systems. Additionally, previous attempts to produce toxicology prediction systems have failed to provide the necessary modeling data and statistical information to accurately predict toxic responses (e.g., WO 00/12760, WO 00/47761, WO 00/63435, WO 01/32928, and WO 01/38579).

### SUMMARY OF THE INVENTION

[0005] The present invention is based on the elucidation of the global changes in gene expression in renal tissues or cells exposed to known toxins, in particular renal toxins, as compared to unexposed tissues or cells as well as the identification of individual genes that are differentially expressed upon toxin exposure.

[0006] In various aspects, the invention includes methods of predicting at least one toxic effect of a compound, predicting the progression of a toxic effect of a compound, and predicting the renal toxicity of a compound. The invention also includes methods of identifying agents that modulate the onset or progression of a toxic response. Also provided are methods of predicting the cellular pathways that a compound modulates in a cell. The invention also includes methods of identifying agents that modulate protein activities.

[0007] In a further aspect, the invention includes probes comprising sequences that specifically hybridize to genes in Tables 1-5N. In some instances, the genes are rat genes. Also included are solid supports comprising at least two of the previously mentioned probes. The invention also includes a computer system that has a database containing information identifying the expression level in a tissue or cell sample exposed to a renal toxin of a set of genes comprising at least two genes in Tables 1-5N.

### DETAILED DESCRIPTION

[0008] Many biological functions are accomplished by altering the expression of various genes through transcriptional (e.g. through control of initiation, provision of RNA precursors, RNA processing, etc.) and/or translational control. For example, fundamental biological processes such as cell cycle, cell differentiation and cell death, are often characterized by the variations in the expression levels of groups of genes.

[0009] Changes in gene expression are also associated with the effects of various chemicals, drugs, toxins, pharmaceutical agents and pollutants on an organism or cell. For example, the lack of sufficient expression of functional tumor suppressor genes and/or the over expression of oncogene/protooncogenes after exposure to an agent could lead to tumorgenesis or hyperplastic growth of cells (Marshall (1991), Cell 64:313-326; Weinberg (1991), Science 254:1138-1146). Thus, changes in the expression levels of particular genes (e.g. oncogenes or tumor suppressors) may serve as signposts for the presence and progression of toxicity or other cellular responses to exposure to a particular compound.

[0010] Monitoring changes in gene expression may also provide certain advantages during drug screening and development. Often drugs are screened for the ability to interact with a major target without regard to other effects the drugs have on cells. These cellular effects may cause toxicity in the whole animal, which prevents the development and clinical use of the potential drug.

[0011] The present inventors have examined tissue from animals exposed to known renal toxins which induce detrimental kidney effects, to identify global changes in gene expression induced by these compounds. These global changes in gene expression, which can be detected by the production of expression profiles (an expression level of one or more genes), provide useful toxicity markers that can be used to monitor toxicity and/or toxicity progression by a test compound. Some of these markers may also be used to monitor or detect various disease or physiological states, disease progression, drug efficacy, and drug metabolism.

[0012] Identification of Toxicity Markers

[0013] To evaluate and identify gene expression changes that are predictive of toxicity, studies using selected compounds with well characterized toxicity have been conducted by the present inventors to catalogue altered gene expression. In the present studies, two different methods were used to create models and databases for predicting toxicity. In one model, RMA/PLS (raw data analysis by the robust multi-array average algorithm, with evaluation of predictive ability by the partial least squares algorithm), high doses of 39 compounds were selected as known renal toxins: acyclovir, adriamycin, amphotericin B, BEA (bromoethylamine hydrobromide), carboplatin, carbon tetrachloride, cephaloridine, chloroform, cidofovir, ciprofibrate, cisplatin, colchicine, cyclophosphamide, cyclosporine A, dantrolene, diflunisal, ethylene glycol, gentamicin, hexachloro-1,3-butadiene, hydralazine, ifosfamide, indomethacin, lithium chloride, meloxicam, menadione, mercuric chloride, olsalazine, puromycin aminonucleoside, pentamidine, phenacetin, propyleneimine, semustine, sodium chromate, sodium oxalate, sulfadiazine, suramin, tacrolimus, thioacetamide and vancomycin. Low doses of these compounds, or the vehicles in which they were prepared, were used as negative controls. Eight additional compounds, or the vehicles in which they were prepared were also selected as negative controls: ceftazidime (a broad spectrum, beta-lactam antibiotic), 17-alpha-ethinylestradiol (a synthetic estrogen), gemfibrozil (a drug that lowers serum triglycerides and LDL cholesterol and increases HDL cholesterol), phenobarbital (a sedative and anticholinergic/antispasmodic drug), streptomycin (an aminoglycoside antibiotic), tamoxifen (an anti-estrogen, breast cancer drug), temozolomide (an anti-cancer drug, especially for brain tumors) and transplatin (an anti-tumor drug).

[0014] In the other model, MAS/LDA (raw data analysis by the Affymetrix® MAS4 algorithm, with evaluation of predictive ability by linear discriminant analysis), high doses of the following compounds were selected as known renal toxins: indomethacin, diflunisal, colchicine, chloroform, diclofenac, menadione, sodium chromate, sodium oxalate, thioacetamide, vancomycin, acyclovir, adriamycin, AY-25329, bromoethylamine HBr (BEA), carboplatin, carbon tetrachloride, cephalosporine, cidofovir, cisplatin, citrinin, cyclophosphamide, cyclosporine, gentamicin, hexachloro-1,3-butadiene, hydralazine, ifosfamide, lithium chloride, mercuric chloride, pamindronate, puromycin aminonucleoside (PAN), semustine and sulfadiazine. Negative controls include low doses of these compounds and the vehicles in which the compounds were prepared. Additional negative controls include the following compounds: captopril, ceftazidime, phenobrbital, streptomycin, tamoxifen, temozolomide and transplatin, as well as the vehicles in which they were prepared. In the MAS/LDA model the following vehicles were used: corn oil, methylcellulose, gum tragacanth and saline.

[0015] Rat Nephrotoxins

[0016] Cephaloridine is an amphoteric, semi-synthetic, broad-spectrum cephalosporin derived from cephalosporin C. Cephalosporins are β-lactam-containing antibiotics which prevent bacterial growth by inhibiting polymerization of the peptidoglycan bacterial cell wall. The linear glycan chains (composed of N-acetylglucosime and N-acetylmuramic acid) are cross-linked to each other by the coupling of short chains of several amino acids, the coupling resulting from the action of a transpeptidase. It is believed that cephalosporins act by blocking the activity of the transpeptidase (Goodman & Gilman's The Pharmalogical Basis of Therapeutics 9^{th} ed., J. G. Hardman et al. Eds., McGraw Hill, New York, 1996, pp. 1074-1075, 1089-1095).

[0017] Cephaloridine is administered intramuscularly and is used to treat infections of the respiratory tract, gastrointestinal tract and urinary tract, as well as infections of soft tissue, bones and joints. Noted adverse effects include hypersensitivity reactions (such as anaphylactic shock, urticaria and bronchospasm), gastrointestinal disturbances, candidiasis, and cardiovascular and blood toxicity, in particular, toxicity to the hematopoietic system (cells responsible for the formation of red and white blood cells and platelets).

[0018] Although cephaloridine may be nephrotoxic at high dosages, it is not as harmful to the kidneys as are the aminoglycosides and polymixins. High dosages of cephaloridine may cause acute renal tubular necrosis (Cecil Textbook of Medicine. 20^{th} ed., part XII, p. 586, J. C. Bennett and F. Plum Eds., W.B. Saunders Co., Philadelphia, 1996) or drug-induced interstitial nephritis, which is accompanied by elevated IgE levels, fever, arthralgia and maculopapular rash. Renal biopsopy demonstrates edema and interstitial inflammatory lesions, mainly with lymphocytes, monocytes, eosinophils and plasma cells. Vasculitis of small vessels may develop, leading to necrotising glomerulonephritis (G. Koren, “The nephrotoxic potential of drugs and chemicals. Pharmacological basis and clinical relevance.,” Med Toxicol Adverse Drug Exp 4(1):59-72, 1989).

[0019] Cephaloridine has also been shown to reduce mitochondrial respiration and uptake of anionic succinate and carrier-mediated anionic substrate transport (Tune et al. (1990), J Pharmacol Exp Ther 252:65-69). In a study of oxidative stress and damage to kidney tissue, cephaloridine depleted reduced glutathione (GSH) and produced oxidized glutathione (GSSG) in the renal cortex. This drug also inhibited glutathione reductase and produced malondialdehyde and conjugated dienes (Tune et al. (1989), Biochem Pharmacol 38:795-802). Because cephaloridine is actively transported into the proximal renal tubule, but slowly transported across the lumenal membrane into the tubular fluid, high concentrations can accumulate and cause necrosis. Necrosis can be prevented by administering inhibitors of organic anion transport, although such treatment may be counterproductive, as cephaloridine is passed in and out of the kidney by the renal organic anion transport system (Tune et al. (1980), J Pharmacol Exp Ther 215:186-190).

[0020] Cisplatin (Pt (NH₃)₂(Cl)₂), a broad-spectrum anti-tumor agent, is commonly used to treat tumors of the testicles, ovaries, bladder, skin, head and neck, and lungs (PDR 47^{th} ed., pp. 754-757, Medical Economics Co., Inc., Montvale, N.J., 1993; Goodman & Gilman's The Pharmalogical Basis of Therapeutics 9^{th} ed., pp. 1269-1271, J. G. Hardman et al. Eds., McGraw Hill, New York, 1996). Cisplatin diffuses into cells and functions mainly by alkylating the N⁷ of guanine, a highly reactive site, causing interstrand and intrastrand crosslinks in the DNA that are lethal to cells. The drug is not sensitive to the cell cycle, although its effects are most pronounced in S phase.

[0021] Because the drug is cleared from the body mainly by the kidneys, the most frequent adverse effect of cisplatin usage is nephrotoxicity, the severity of which increases with increasing dosage and treatment terms. Other adverse effects include renal tubule damage, myelosuppression (reduced numbers of circulating platelets, leukocytes and erythrocytes), nausea and vomiting, ototoxicity, serum electrolyte disturbances (decreased concentrations of magnesium, calcium, sodium, potassium and phosphate, probably resulting from renal tubule damage), increased serum concentrations of urea and creatinine, and peripheral neuropathies.

[0022] In one study on rats (Nonclercq et al. (1989), Exp Mol Pathol 51:123-140) administration of cisplatin or carboplatin induced renal injury, carboplatin causing less damage than cisplatin. The most prominent injury was to the straight portion of proximal renal tubule.

[0023] In another rat study (Goldstein et al. (1981), Toxicol Appl Pharmacol 60:163-175) animals injected with cisplatin displayed decreased food intake as drug dosage increased. On day 2, the high-dose groups (10-15 mg/kg) exhibited a six or seven-fold elevation in BUN. On day 4, BUN elevation was noted in the 5 mg/kg group. An increase in urine volume was observed beginning on days 3-4, along with decreased urine osmolality in the low-dose groups (2.5 or 5 mg/kg). Another experiment on rats (Agarwal et al. (1995), Kidney Int 48:1298-1307) showed that cisplatin treatment produced elevations in serum creatinine levels, which began on day 3 and progressed for the duration of the study.

[0024] Puromycin aminonucleoside (PAN, C₂₂H₂₉N₇O₅), an antibiotic produced by Streptomyces alboniger, inhibits protein synthesis and is commonly used experimentally on rats to mimic human minimal change disease. One study showed that PAN-injected rats demonstrated an increase in levels of serum non-esterified fatty acids, while the serum albumin concentration was negatively affected (Sasaki et al. (1999), Adv Exp Med Biol 467:341-346).

[0025] In another rat study, an adenosine deaminase inhibitor prevented PAN nephrotoxicity, indicating that PAN toxicity is linked to adenosine metabolism (Nosaka et al. (1997), Free Radic Biol Med 22:597-605). Another group showed that PAN, when administered to rats, led to proteinuria, a condition associated with abnormal amounts of protein in the urine, and renal damage, e.g. blebbing of glomerular epithelial cells, focal separation of cells from the glomerular basement membrane, and fusion of podocytes (Olson et al. (1981), Lab Invest 44:271-279). In another study on rats, administration of PAN induced glomerular epithelial cell apoptosis in a dose- and time-dependent manner (Sanwal et al. (2001), Exp Mol Pathol 70:54-64).

[0026] One study with PAN-injected rats (Koukouritaki et al. (1998), J Investig Med 46: 284-289) examined the changes in the expression of the proteins paxillin, focal adhesion kinase, and Rho, all of which regulate cell adhesion to the extracellular matrix. Paxillin levels increased steadily, peaked at day 9 after PAN injection, and then remained elevated even after proteinuria resolved. There was no observed change in expression of either focal adhesion kinase or Rho.

[0027] BEA, (C₂H₆BrN.HBr), is commonly used experimentally on rats to induce papillary necrosis and renal cortex damage, which is similar to human analgesic nephropathy. BEA-induced papillary necrosis in rats eventually leads to the onset of focal glomerular sclerosis and nephrotic proteinuria (Garber et al. (1999), Am J Kidney Dis 33: 1033-1039). Even at low doses (50 mg/kg), BEA can induce an apex limited renal papillary necrosis (Bach et al. (1983), Toxicol Appl Pharmacol 69:333-344). In male Wistar rats, BEA administered at 100 mg/kg was shown to cause renal papillary necrosis within 24 hours (Bach et al. (1991), Food Chem Toxicol 29:211-219). Additionally, Bach et al. showed that there was an increase in urinary triglycerides, and lipid deposits were seen by Oil Red O lipid staining in the cells of the collecting ducts and hyperplastic urothelia adjacent to the necrosed region.

[0028] It has also been shown that succinate and citrate concentrations are significantly lower in the urine of BEA-treated rats (Holmes et al. (1995), Arch Toxicol 70:89-95). Moreover, BEA treatment induced glutaric and adipic aciduria, which is symptomatic of an enzyme deficiency in the acyl CoA dehydrogenases. The same study examined urinary taurine levels in desert mice, and in BEA-treated desert mice there was an increase in the urinary taurine level which is indicative of liver toxicity.

[0029] Another study on BEA-treated rats showed that there was an increase in the concentrations of creatine in the renal papilla and glutaric acid in the liver, renal cortex, and renal medulla as soon as 6 hours post-treatment (Garrod et al. (2001), Magn Reson Med 45: 781-790).

[0030] Discovered and purified in the early 1960's, gentamicin is a broad-spectrum aminoglycoside antibiotic that is cidal to aerobic gram-negative bacteria and commonly used to treat infections, e.g., those of the urinary tract, lungs and meninges. As is typical for an aminoglycoside, the compound is made of two amino sugar rings linked to a central aminocyclitol ring by glycosidic bonds. Aminoglycosides are absorbed poorly with oral administration, but are excreted rapidly by the kidneys. As a result, kidney toxicity is the main adverse effect, although ototoxicity and neuromuscular blockade can also occur. Gentamicin acts by interfering with bacterial protein synthesis. This compound is more potent than most other antibacterial inhibitors of protein synthesis, which are merely bacteriostatic, and its effects on the body are, likewise, more severe (Goodman & Gilman's The Pharmalogical Basis of Therapeutics 9^{th} ed., pp. 1103-1115, J. G. Hardman et al. Eds., McGraw Hill, New York, 1996).

[0031] Aminoglycosides work rapidly, and the rate of bacterial killing is concentration-dependent. Residual bactericidal activity remains after serum concentration has fallen below the minimum inhibitory concentration (MIC), with a duration that is also dosage/concentration-dependent. The residual activity allows for once-a-day administration in some patients. These drugs diffuse into bacterial cells through porin channels in the outer membrane and are then transported across the cytoplasmic membrane via a membrane potential that is negative on the inside (Goodman & Gilman, supra).

[0032] Kidney damage, which can develop into renal failure, is due to the attack of gentamicin on the proximal convoluted tubule, particularly in the S1 and S2 segments. The necrosis, however, is often patchy and focal (Shanley et al. (1990), Ren Fail 12:83-87). A rat study by Shanley et al. showed that superficial nephrons are more susceptible to necrosis than juxtamedullary nephrons, although the initial segment of the superficial nephrons is remarkably resistant to necrosis.

[0033] Reported enzymatic changes upon gentamicin treatment are increased activities of N-acetyl-beta-D-glucosamimidase and alkaline phosphatase and decreased activities of sphingomyelinase, cathepsin B, Na⁺/K⁺-ATPase, lactate dehydrogenase and NADPH cytochrome C reductase, along with decreased protein synthesis and alpha-methylglucose transport (Monteil et al. (1993), Ren Fail 15:475-483). An increase in gamma-glutamyl transpeptidase activity in urine has also been reported (Kocaoglu et al. (1994), Arch Immunol Ther Exp (Warsz) 42:125-127), and the quantification of this enzyme in urine is a useful marker for monitoring gentamicin toxicity.

[0034] One source of renal pathology resulting from gentamicin treatment is the generation of reactive oxygen metabolites. Gentamicin has been shown, both in vitro and in vivo, to be capable of enhancing the production of reactive oxygen species. Iron, a necessary co-factor that catalyzes free-radical formation, is supplied by cytochrome P450 (Baliga et al. (1999), Drug Metab Rev 31:971-997).

[0035] A gene delivery experiment in rats, in which the human kallikrein gene was cloned into an adenovirus vector and the construct then co-administered with a gentamicin preparation, showed that kallikrein can protect against gentamicin-induced nephrotoxicity. Significantly increased renal blood flow, glomerular filtration rates and urine flow were observed, along with decreased renal tubular damage, cellular necrosis and lumenal protein casts. Kallikrein gene delivery also caused a decrease in blood urea nitrogen levels and increases in urinary kinin and nitrite/nitrate levels. This study provides evidence that the tissue kallikrein-kinin system may be a key pathway that is perturbed during the induction of nephrotoxicity by gentamicin (Murakami et al. (1998), Kidney Int 53:1305-1313).

[0036] Ifosfamide, an alkylating agent, is commonly used in chemotherapy to treat testicular, cervical, and lung cancer. Ifosfamide is slowly activated in the liver by hydroxylation, forming the triazene derivative 5-(3,3-dimethyl-1-triazeno)-imidazole-4-carboxamide (DTIC) (Goodman & Gilman's The Pharmacological Basis of Therapeutics 9^{th} ed., p. 1235, J. G. Hardman et al., Eds., McGraw Hill, New York, 1996). Cytochrome P450 activates DTIC via an N-demethylation reaction yielding an alkylating moiety, diazomethane. The active metabolites are then able to cross-link DNA causing growth arrest and cell death. Though ifosfamide is therapeutically useful, it is also associated with nephrotoxicity, urotoxicity, and central neurotoxicity.

[0037] Mesna, another therapeutic, is often administered concomitantly to prevent kidney and bladder problems from arising (Brock and Pohl (1986), IARC Sci Publ 78:269-279). However, there are documented cases in which tubular toxicity occurred and elevated urinary levels of alanine aminopeptidase and N-acetyl-beta-D-glucosamimidase were found in patients even though mesna was administered alongside ifosfamide (Goren et al. (1987), Cancer Treat Rep 71:127-130).

[0038] One study examined 42 patients that had been administered ifosfamide to treat advanced soft-tissue sarcoma (Stuart-Harris et al. (1983), Cancer Chemother Pharmacol 11:69-72). The ifosfamide dosage varied from 5.0 g/m² to 8.0 g/m², and all of the patients were given mesna to counteract the negative effects of ifosfamide. Even so, nausea and vomiting were common to all of the patients. Out of the 42 patients, seven developed nephrotoxicity, and two of the cases progressed to fatal renal failure.

[0039] In another clinical study, renal tubular function was monitored in 18 neuroblastoma patients (Caron et al. (1992), Med Pediatr Oncol 20:42-47). Tubular toxicity occurred in at least 12 of the patients, and seven of those patients eventually developed Debre-de Toni-Fanconi syndrome, although in 3 cases the syndrome was reversible.

[0040] Fanconi syndrome is a disorder marked by dysfunction of the proximal tubules of the kidney. It is associated with aminoaciduria, renal glycosuria, and hyperphosphaturia. Ifosfamide is often used experimentally on rats to induce Fanconi syndrome. In one study, rats that were administered 80 mg/kg of ifosfamide had significantly lower body weight and hematocrit than control rats (Springate and Van Liew (1995), J Appl Toxicol 15:399-402). Additionally, the rats had low-grade glucosuria, proteinuria, and phosphaturia. In a mouse study, ifosfamide induced elevated serum creatinine and urea levels and decreased the clearance rate of creatinine (Badary (1999), J Ethnopharmacol 67:135-142).

[0041] Cyclophosphamide, a nitrogen mustard and alkylating agent, is highly toxic to dividing cells and is commonly used in chemotherapy to treat malignant lymphomas, such as non-Hodgkin's lymphomas and Burkitt's lymphoma, multiple myeloma, leukemias, neuroblastomas, ovarian adenocarcinomas and retinoblastomas, as well as breast and lung cancer (Goodman & Gilman's The Pharmacological Basis of Therapeutics 9^{th} ed., pp. 1234, 1237-1239, J. G. Hardman et al., eds., McGraw Hill, New York, 1996; Physicians Desk Reference, 47^{th} ed., pp. 744-745, Medical Economics Co., Inc., Montvale, N.J., 1993). Additionally, cyclophosphamide is used as an immunosuppressive agent in bone marrow transplantation and following organ transplantation. Although cyclophosphamide is therapeutically useful against certain types of cancer, it is also associated with cardiotoxicity, nephrotoxicity (including renal tubular necrosis), hemorrhagic cystitis, myelosuppression, hepatotoxicity, impairment of male and female reproductive systems, interstitial pneumonitis and central nervous system toxicity.

[0042] Once in the liver, cyclophosphamide is hydroxylated by the cytochrome P450 mixed function oxidase system, producing the active metabolites phosphoramide mustard and acrolein, which cross-link DNA and cause growth arrest and cell death. These metabolites, however, are highly toxic and cause adverse effects in the other organs into which they are transported, such as the kidneys. Acrolein is removed from the kidneys by secretion into the urine, resulting in cystitis (inflammation of the bladder), often hemorrhagic cystitis.

[0043] In the kidney, cyclophosphamide induces necrosis of the renal distal tubule. Cyclophosphamide, which is structurally similar to the anti-cancer drug ifosfamide, does not induce damage to the renal proximal tubule nor does it induce Debre-de Toni-Fanconi syndrome (Rossi et al. (1997), Nephrol Dial Transplant 12:1091-1092).

[0044] One clinical trial of patients being treated with cyclophosphamide showed that renal damage from the drug leads to a reduced biotransformation rate and low renal clearance of the drug, resulting in a build-up of toxic alkylating metabolic products (Wagner et al. (1980), Arzneimittelforschung 30:1588-1592).

[0045] In a study of patients suffering from malignant lymphomas and mammary carcinomas, a direct relationship was found between the dose of cyclophosphamide used in treatment and the concentration of alkylating metabolites in the patients' urine. The upper limit of the dose was determined by the nature and degree of the toxic side effects, rather than by the rate at which the drug could be metabolized (Saul et al. (1979), J Cancer Res Clin Oncol 94:277-286). It is the acrolein itself that is toxic, not the alkylating activity of cyclophosphamide (Brock et al. (1979), Arzneimittelforschung 29:659-661). A study on rats also showed that acrolein from the kidneys can produce hemorrhagic cystitis and that the acrolein concentration is directly related to the frequency and severity of the cystitis (Chijiwa et al. (1983), Cancer Res 43:5205-5209).

[0046] Carboplatin, a platinum coordination complex, is commonly used in chemotherapy as an anti-tumor agent. As a chemotherapeutic agent, carboplatin acts similarly to cisplatin. Carboplatin enters the cell by diffusion where it is activated by hydrolysis (Goodman & Gilman's The Pharmacological Basis of Therapeutics 9th ed., p. 1270-1271, J. G. Hardman et al. Eds., McGraw Hill, New York 1996). Once activated, the platinum complexes are able to react with DNA causing cross-linking to occur. One of the differences between carboplatin and cisplatin is that carboplatin is better tolerated clinically. Some of the side-effects associated with cisplatin, such as nausea, neurotoxicity, and nephrotoxicity, are seen at a lesser degree in patients administered carboplatin. Some other side-effects are hypomagnesaemia and hypokalaemia (Kintzel (2001), Drug Saf 24:19-38).

[0047] In one study on male Wistar rats, carboplatin was administered at a dosage of 65 mg/kg (Wolfgang et al. (1994), Fundam Appl Toxicol 22:73-79). After treatment with carboplatin, CGT excretion was increased approximately two-fold.

[0048] Another study compared cisplatin and carboplatin when given in combination with vindesine and mitomycin C (Jelic et al. (2001) Lung Cancer 34:1-13). The study showed that carboplatin administered with vindesine and mitomycin C was advantageous in terms of overall survival, although the regimen was more hematologically toxic than when cisplatin was given.

[0049] AY-25329, is a phenothiazine that has been shown to be mildly hepatotoxic and to induce nephrosis. Its structure is shown below.

[chemical structure]

[0050] Phenothiazines are a class of psychoactive drugs. They have been used to treat schizophrenia, paranoia, mania, hyperactivity in children, some forms of senility, and anxiety (http://www.encyclopedia.com/articlesnew/36591.html). Some side effects associated with prolonged use of the drugs are reduced blood pressure, Parkinsonism, reduction of motor activity, and visual impairment.

[0051] Chlorpromazine (Thorazine or Largactil) is an aliphatic phenothiazine and is widely used for treating schizophrenia and manic depression. Prolactin secretion is increased while taking chlorpromazine, and galactorrhea and gynecomastia have both been associated with the drug (http://www.mentalhealth.com/drug/p30-c01.html). Trifluoperazine is another prescribed phenothiazine. It is used to treat anxiety, to prevent nausea and vomiting, and to manage psychotic disorders (http://www.mentalhealth.com/drug/p30-s04.html). Negative side-effects that have been associated with the drug are liver damage, bone marrow depression, and Parkinsonism.

[0052] Acyclovir (9-[(2-hydroxyethyl)methyl]guanine, Zovirax®), an anti-viral guanosine analogue, is used to treat herpes simplex virus (HSV), varicella zoster virus (VZV) and Epstein-Barr virus (EBV) infections. It is transported into cells by the nucleoside transporter that imports guanine, and acyclovir is phosphorylated by virally encoded thymidine kinase (TK). Other kinases convert acyclovir to its activated di- and triphosphate forms, which prevent the polymerization of viral DNA. Acyclovir triphosphate competes with dGTP for the viral polymerase, and acyclovir is preferentially incorporated, but as a monophosphate. As a result, chain elongation ceases (Fields Virology 3d ed., Fields et al., eds., pp. 436-440, Lippincott-Raven Publishers, Philadelphia, 1996; Cecil Textbook of Medicine, 20^{th} ed., part XII, p. 1742, J. C. Bennett and F. Plum Eds., W.B. Saunders Co., Philadelphia, 1996).

[0053] The pharmacokinetics of acyclovir show that it has a useful half-life of about three hours and that most of it is excreted in the urine largely unchanged (Brigden et al. (1985), Scand J Infect Dis Suppl 47:33-39). Not surprisingly, the most frequent adverse effect of acyclovir treatment is damage to various parts of the kidney, particularly the renal tubules. Crystalluria, or the precipitation of crystals (in this case, crystals of acyclovir), in the lumina of the renal tubules can occur (Fogazzi (1996), Nephrol Dial Transplant 11:379-387). If the drug crystallizes in the renal collecting tubules, obstructive nephropathy and tubular necrosis can result (Richardson (2000), Vet Hum Toxicol 42:370-371). Tissues from biopsies of affected patients showed dilation of the proximal and distal renal tubules, with loss of the brush border, flattening of the lining cells and focal nuclear loss (Becker et al. (1993), Am J Kidney Dis 22:611-615).

[0054] Citrinin, a mycotoxin produced by the fungus Penicillium citrinum, is a natural contaminant of foods and feeds (Bondy and Armstrong (1998) Cell Biol. Toxicol. 14:323-332). It is known that mycotoxins can have negative effects on the immune system, however citrinin-treated animals have been shown to stimulate responses against antigens (Sharma (1993) J. Dairy Sci. 76:892-897). Citrinin is a known nephrotoxin, and in birds such as chickens, ducklings, and turkeys, it causes diarrhea, increased food consumption and reduced weight gain due to kidney degeneration (Mehdi et al. (1981) Food Cosmet. Toxicol. 19:723-733; Mehdi et al. (1984) Vet. Pathol. 21:216-223). In the turkey and duckling study, both species exhibited nephrosis with the occurrence of hepatic and lymphoid lesions (Mehdi et al., 1984).

[0055] In one study, citrinin was administered to rabbits as a single oral dose of either 120 or 67 mg/kg (Hanika et al. (1986) Vet. Pathol. 23:245-253). Rabbits treated with citrinin exhibited renal alterations such as condensed and distorted mitochondria, distended intercellular spaces of the medullary and straight cortical distal tubules, and disorganization of interdigitating processes. In another rabbit study, citrinin-administered rabbits displayed azotaemia and metabolic acidosis (Hanika et al. (1984) Food Chem. Toxicol. 22:999-1008). Renal failure was indicated by decreased creatinine clearance and increased blood urea nitrogen and serum-creatinine levels.

[0056] In the past, mercury was an important component of pharmaceuticals, particularly of antiseptics, antibacterials, skin ointments, diuretics and laxatives. Although, mercury has been largely replaced by more effective, more specific and safer compounds, making drug-induced mercury poisoning rare, it is still widely used in industry. Poisoning from occupational exposure and environmental pollution, such as mercury release into public water supplies, remains a concern as wildlife, domestic animals and humans are affected.

[0057] Because of their lipid solubility and ability to cross the blood-brain barrier, the most dangerous form of mercury is the organomercurials, the most common of which is methylmercury, a fungicide used for disinfecting crop seeds. In a number of countries, incidents involving large-scale illness and death from mercury poisoning have been reported when mercury-contaminated seeds were planted and the crops harvested and consumed. A second source of organic mercury poisoning results from industrial chemicals containing inorganic mercury, such as mercury catalysts, which form methylmercury as a reaction product. If this waste product is released into reservoirs, lakes, rivers or bays, the surrounding population can become sick or die, particularly those who eat local fish.

[0058] The inorganic salt mercuric chloride, HgCl₂, as well as other mercuric salts, are more irritating and more toxic than the mercurous forms. Mercuric chloride is used today in industry, for the manufacture of bleach, electronics, plastics, fungicides and dental amalgams. The main source of human exposure is industrial dumping into rivers (Goodman & Gilman's: The Pharmacological Basis of Therapeutics (9th ed.), pp. 1654-1659, McGraw-Hill, New York, 1996).

[0059] When inorganic mercury salts are ingested, about 10% of the mercuric ions are absorbed by the gastrointenstinal tract, and a considerable portion of the Hg²⁺ can remain bound to the mucosal surfaces. The highest concentration of Hg²⁺ is found in the kidneys, as it is retained there longer than in other tissues. Consequently, the kidneys are the organ most adversely affected by inorganic mercury poisoning. The proximal tubules are the major site of damage, where tubular necrosis results. The mercury affects primarily the S2 and S3 portions of the proximal tubules, but, at high levels of mercury exposure, the S1 and distal portions of the tubules are also damaged. These regions of the nephrons are affected because they contain enzymes (such as gamma-glutamyltranspeptidase) and transport proteins (such as the basolateral organic anion transport system) involved in mercury uptake (Diamond et al. (1998), Toxicol Pathol 26:92-103).

[0060] Urinary markers of mercury toxicity which can be detected in NMR spectra include elevated levels of lactate, acetate and taurine and decreased levels of hippurate (Holmes et al. (2000), Chem Res Toxicol 13:471-478). Known changes in gene expression in kidneys exposed to Hg²⁺ include up-regulation of the heat-shock protein hsp72 and of the glucose-regulated protein grp94. The degree of tissue necrosis and level of expression of these proteins is proportional to both the dose of mercury (Hg²⁺) and the length of the exposure time to mercury (Hg²⁺), with hsp72 accumulating in the renal cortex and grp94 accumulating in the renal medulla (Goering et al. (2000), Toxicol Sci 53:447-457).

[0061] Indomethacin is a non-steroidal antiinflammatory, antipyretic and analgesic drug commonly used to treat diseases such as rheumatoid arthritis, osteoarthritis, ankylosing spondylitis and gout. This drug acts as a potent inhibitor of prostaglandin synthesis; it inhibits the cyclooxygenase enzyme necessary for the conversion of arachidonic acid to prostaglandins (PDR 47th ed., Medical Economics Co., Inc., Montvale, N.J., 1993; Goodman & Gilman's The Pharmalogical Basis of Therapeutics 9th ed., J. G. Hardman et al., Eds., McGraw Hill, New York, 1996, pp. 1074-1075, 1089-1095; Cecil Textbook of Medicine, 20th ed., part XII, pp. 772-773, 805-808, J. C. Bennett and F. Plum Eds., W.B. Saunders Co., Philadelphia, 1996).

[0062] The most frequent adverse effects of indomethacin treatment are gastrointestinal disturbances, e.g., bleeding, ulcers and perforations, although renal toxicity can also result, particularly after long-term administration. In rats, hemorrhage and necrosis have been observed in the renal papillae and fornix, as well as damage to the thick ascending limbs (mTALs), and interstitial nephritis with hematuria, proteinuria and nephrotic syndrome have been reported in humans. Patients suffering from renal dysfunction risk developing a reduction in renal blood flow and urinary outflow, because renal prostaglandins play an important role in renal perfusion and glomerular filtration (Heyman et al. (1997), Kidney Int 51: 653-663).

[0063] Diflunisal, a non-steroidal anti-inflammatory drug (NSAID), is a difluorophenyl derivative of salicylic acid (Goodman & Gilman's The Pharmacological Basis of Therapeutics 9^{th} ed., p. 631, J. G. Hardman et al., Eds., McGraw Hill, New York, 1996). It is most frequently used in the treatment of osteoarthritis and musculoskeletal strains. NSAIDs have analgesic, antipyretic and anti-inflammatory actions, however hepatotoxicity is known to be an adverse side effect of NSAID treatment (Masubuchi et al. (1998) J. Pharmacol. Exp. Ther. 287:208-213). Diflunisal has been shown to be less toxic than other NSAIDs, nevertheless over long periods of dosage it can lead to deleterious effects on platelet or kidney function (Bergamo et al. (1989) Am. J. Nephrol. 9:460-463). Other side effects that have been associated with diflunisal treatment are diarrhea, dizziness, drowsiness, gas or heartburn, headache, nausea, vomiting, and insomnia (http://arthritisinsight.com/medical/meds/dolobid.html).

[0064] Masubuchi et al. compared the hepatotoxicity of 18 acidic NSAIDs. In the study, diflunisal (administered at a concentration of 500 μM) was shown to increase LDH leakage in rat hepatocytes, a marker for cell injury, when compared to the control sample. In addition, treatment with diflunisal led to decreased intracellular ATP concentrations.

[0065] One study compared the effects of diflunisal and ibuprofen when given to patients over a two week period (Muncie and Nasrallah (1989) Clin. Ther. 11:539-544). In both the ibuprofen and the diflunisal group, two patients complained of abdominal cramping. The study indicated that even during short-term usage some gastrointestinal effects may occur. The toxic dose used in this study was chosen as one that did not induce significant gastric ulceration in rats. The group of rats given the high dosage of diflunisal had increased concentrations of creatinine which is consistent with renal injury, although dehydration may also cause increases in creatinine concentration.

[0066] Cidofovir (Vistide®) is an antiviral cytosine analog used in the treatment of viral infections such as herpesvirus, adenovirus, papillomavirus, poxvirus and hepadnavirus (Goodman & Gilman's The Pharmacological Basis of Therapeutics 9^{th} ed., p. 1216, J. G. Hardman et al., Eds., McGraw Hill, New York, 1996). It is also useful for the treatment of cytomegalovirus (CMV) infection, which is a type of herpesvirus.

[0067] Some mild side effects seen in patients receiving cidofovir are nausea, vomiting, and fever. The most serious reported side effect of the drug is kidney toxicity (http://tthivclinic.com/cido.html). In response to the threat of nephrotoxicity, it is necessary for patients receiving cidofovir to have their kidneys checked before treatment, and the patients must be monitored during treatment for early symptoms of kidney problems. In addition, cidofovir is given with fluids to help reduce the risk of kidney toxicity (http://www.aidsinfonyc.org/network/simple/cido.html). Probenecid, a drug that helps protect the kidneys, is normally administered concomitantly (Lalezari and Kuppermann (1997) J. Acquir. Immune Defic. Syndr. Hum. Retrovirol. 14:S27-31).

[0068] One study compared the safety and efficacy of cidofovir in the treatment of CMV (Lalezari et al. (1998) J. Acquir. Immune Defic. Syndr. Hum. Retrovirol. 17:339-344). Approximately 40% of the patients exhibited dose-dependent asymptomatic proteinuria and 25% of the patients had elevated serum creatinine levels.

[0069] Pamidronate (Aredia®) is a bisphosphonate drug that is clinically used to inhibit bone resorption and make bones more stable. It is used to treat hypercalcemia (too much calcium in the blood) that occurs with some types of cancer. Typically administered by intravenous injection, pamidronate is frequently used in patients with breast cancer or multiple myeloma whose disease has spread to the bones. Some side effects related to pamidronate treatment are abdominal cramps, chills, confusion, fever, muscle spasms, nausea, muscle stiffness, and swelling at the injection site (http://www.nursing.uiowa.edu/sites/PedsPain/Adjuvants/PAMIDRnt.html). Patients with kidney problems may be prohibited from using pamidronate as it is excreted through the kidneys.

[0070] In one study, rats and mice were given varying doses of labeled pamidronate (Cal and Daley-Yates (1990) Toxicology 65:179-197). Pamidronate treatment led to significant weight loss and a decrease in creatinine clearance. Morphological studies showed a loss of brush border membranes and the presence of focal proximal tubular necrosis.

[0071] Another study compared the tolerability of different treatments for hypercalcemia of malignancy by reviewing articles published between 1979 and 1998 (Zojer et al. (1999) Drug Saf. 21:389-406). The authors found that elevated serum creatinine level, nausea, and fever were reported following treatment with bisphosphonates such as pamidronate.

[0072] Markowitz et al. (2001, J. Am. Soc. Nephrol. 12:1164-1172) tried to determine whether there was a correlation between pamidronate treatment and collapsing focal segmental glomerulosclerosis (FSGS). The authors examined the histories of seven patients who had developed collapsing FSGS, and they found that the only drug treatment in common was the administration of pamidronate. When given at the recommended dose of 90 mg per month, renal toxicity was rare. However, when pamidronate was given at higher doses nephrotoxicity occurred.

[0073] Lithium, an alkali metal, is the main pharmacological treatment for bipolar disorders. It is typically given as a salt, such as lithium carbonate or lithium citrate. Some common side effects of lithium treatment are an increase in urination, increase in drinking, dry mouth, weight gain, fine tremor, and fatigue. Some more serious side effects related to lithium treatment are blurred vision, mental confusion, seizures, vomiting, diarrhea, muscle weakness, drowsiness, and coarse tremor (Goodman & Gilman's The Pharmacological Basis of Therapeutics 9^{th} ed., p. 448, J. G. Hardman et al., Eds., McGraw Hill, New York, 1996).

[0074] Since lithium is often used on a maintenance basis for a lifelong period, numerous studies have been performed to try and elucidate the effects of lithium on the kidney. One group administered lithium in daily doses within the human therapeutic range to male Wistar rats (Kling et al. (1984) Lab Invest 50:526-535). Rats that were given lithium developed marked polyuria within three weeks of the initial dosing. The rats displayed elevated free water clearance and vasopressin-resistant diabetes insipidus. The cortical collecting tubules displayed morphological changes, e.g. dilation of the tubules, bulging cells lining the tubules, enlarged nuclei, following lithium treatment.

[0075] Another study examined a human population that had been given lithium for the treatment of bipolar disorder (Markowitz et al. (2000) J. Am. Soc. Nephrol. 11: 1439-1448). The patients had a mean age of 42.5 years and had been undergoing lithium treatment from 2 to 25 years (mean of 13.6 years). Approximately one fourth of the patients had nephrotic proteinuria, almost 90% of them had nephrogenic diabetes insipidus (NDI), and renal biopsies revealed a chronic tubulointerstitial nephropathy in all of the patients. Following cessation of lithium treatment, seven of the patients proceeded to end-stage renal disease.

[0076] Even though nephrotoxicity is a known side effect of lithium treatment, some studies have indicated that in actuality it is not all that common (Johnson (1998) Neuropsychopharmacology 19:200-205). One study showed that the NDI-like effect in lithium treatment was easily overcome by increasing the levels of arginine vasopressin (AVP) (Carney et al. (1996) Kidney Int 50:377-383). Other studies have suggested that patients with psychiatric disorders display certain defects in renal function without undergoing lithium treatment (Gitlin (1999) Drug Saf 20:231-243).

[0077] Hydralazine, an antihypertensive drug, causes relaxation of arteriolar smooth muscle. Such vasodilation is linked to vigorous stimulation of the sympathetic nervous system, which in turn leads to increased heart rate and contractility, increased plasma renin activity, and fluid retention (Goodman & Gilman's The Pharmacological Basis of Therapeutics 9^{th} ed., p. 794, J. G. Hardman et al., Eds., McGraw Hill, New York, 1996). The increased renin activity leads to an increase in angiotensin II, which in turn causes stimulation of aldosterone and sodium reabsorption.

[0078] Hydralazine is used for the treatment of high blood pressure (hypertension) and for the treatment of pregnant women suffering from high blood pressure (pre-eclampsia or eclampsia). Some common side effects associated with hydralazine use are diarrhea, rapid heartbeat, headache, decreased appetite, and nausea. Hydralazine is often used concomitantly with drugs that inhibit sympathetic activity to combat the mild pulmonary hypertension that can be associated with hydralazine usage.

[0079] In one hydralazine study, rats were fed hydralazine and mineral metabolism was monitored (Peters et al. (1988) Toxicol Lett 41:193-202). Manganese and zinc concentrations were not effected by hydralazine treatment, however tissue iron concentrations were decreased and kidney copper concentrations were increased compared to control groups.

[0080] Another study compared the effects of hydrazine, phenelzine, and hydralazine treatment on rats (Runge-Morris et al. (1996) Drug Metab Dispos 24:734-737). Hydralazine caused an increase in renal GST-alpha subunit expression, although unlike hydrazine and phenelzine it did not alter renal cytochrome P4502E1 expression.

[0081] Colchicine, an alkoloid of Colchicum autumale, is an antiinflammnatory agent used in the treatment of gouty arthritis (Goodman & Gilman's The Pharmacological Basis of Therapeutics 9^{th} ed., p. 647, J. G. Hardman et al., Eds., McGraw Hill, New York, 1996).

[0082] An antimitotic agent, colchicine binds to tubulin which leads to depolymerization and disappearance of the fibrillar microtubules in granulocytes and other motile cells. In doing so, the migration of granulocytes into the inflamed area is inhibited. Through a series of events, the inflammatory response is blocked.

[0083] Some common, mild side effects associated with colchicine treatment are loss of appetite and hair loss. More severe side effects that warrant cessation of treatment are nausea, vomiting, diarrhea, and abdominal pain. Colchicine overdose can induce multiorgan failure with a high incidence of mortality. In this setting, renal failure is multifactorial and related to prolonged hypotension, hypoxemia, sepsis, and rhabdomyolysis. In rats, less dramatic doses have been shown to inhibit the secretion of many endogenous proteins such as insulin and parathyroid hormone.

[0084] One study investigated the effects of colchicine on microtubule polymerization status and post-translational modifications of tubulin in rat seminiferous tubules (Correa and Miller (2001) Biol Reprod 64:1644-1652). Colchicine caused extensive microtubule depolymerization, and total tubulin levels decreased twofold after colchicine treatment. The authors also found that colchicine treatment led to a decrease in tyrosination of the microtubule pool of tubulin which was associated with depolymerization of microtubules.

[0085] Sulfadiazine, a sulfonamide, is an antimicrobial agent. It is commonly used concomitantly with pyrimethamine to treat toxoplasmosis, an infection of the brain, in patient suffering from AIDS. These drugs are able to cross the blood-brain barrier and are used at relatively high doses. In addition, sulfadiazine has been shown to be effective at preventing certain types of meningococcal diseases and in treating urinary tract infections.

[0086] Sulfonamides in general are structural analogs of para-aminobenzoic acid (PABA). Because they are competitive antagonists of PABA, sulfonamides are effective against bacteria that are required to utilize PABA for the synthesis of folic acid (Goodman & Gilman's The Pharmacological Basis of Therapeutics 9^{th} ed., p. 1058-1060, J. G. Hardman et al., Eds., McGraw Hill, New York, 1996).

[0087] The main side effects associated with sulfadiazine treatment are fever and skin rashes. Decreases in white blood cells, red blood cells, and platelets, nausea, vomiting, and diarrhea are some other side effects that may result from sulfadiazine treatment. The most troublesome problem with this drug for HIV/AIDS patients is kidney toxicity. These patients tend to use these drugs for extended periods of time, which puts a constant strain on the kidneys. In addition, kidney stones tend to form in the bladder and ureter thereby blocking the flow of urine. Kidney damage may result, and if left untreated kidney failure may occur. Therefore, patients being treated with sulfadiazine are instructed to increase their fluid intake in order to prevent crystal formation in the kidneys.

[0088] One case study examined four HIV-positive patients who had been given sulfadiazine to treat toxoplasmosis (Crespo et al. (2000) Clin Nephrol 54:68-72). All four of the patients, one of whom was a previously healthy person, developed oliguria, abdominal pain, renal failure, and displayed multiple radiolucent renal calculi in echography. Following extensive hydration and alcalinization, the renal function of the patients returned to normal.

[0089] Adriamycin, known generically as doxorubicin, is an anthracycline antibiotic produced by the fungus Streptomyces peucetius. It is an anti-tumor drug used in the treatment of breast, ovarian, bladder, and lung cancers as well as non-Hodgkin's lymphoma, Hodgkin's disease and sarcoma (Goodman & Gilman's The Pharmacological Basis of Therapeutics 9^{th} ed., p. 1264-1265, J. G. Hardman et al., Eds., McGraw Hill, New York, 1996).

[0090] Adriamycin has tetracycline ring structures with the sugar daunosamine attached by glycosidic linkage. It is able to intercalate with DNA, it affects DNA and RNA synthesis, and it can interact with cell membranes and alter their functions. Typically the drug is cell-cycle specific for the S phase of cell division. By binding to the cancer cells' DNA and blocking topoisomerase II, cancer cells are unable to divide and grow.

[0091] Some common side effects associated with adriamycin treatment are fatigue, a drop in white blood cell, red blood cell, or platelet count, hair loss, skin discoloration, and watery eyes (www.cancerhelp.org.uk/help/default.asp?page=4025). More serious side effects include myocardial toxicity, ulceration and necrosis of the colon, and development of a second cancer.

[0092] Because of its utility in fighting cancer, numerous studies have been performed in attempts to further understand the mechanisms and effects of adriamycin. In one study, investigators injected mice with a single dose of adriamycin (Chen et al. (1998) Nephron 78:440-452). The mice exhibited signs of combined glomerular albuminuria and immunoglublinuria, progressively elevated levels of nitrite/nitrate in the urine, abnormal renal function, and other symptoms indicative of focal segmental glomerulosclerosis.

[0093] In another study, rats were given adriamycin and the effects on angiotensin converting enzyme (ACE) were monitored (Venkatesan et al. (1993) Toxicology 85:137-148). The rats developed glomerular and tubular injury, and serum ACE levels were significantly elevated 20, 25, and 30 days post-treatment. A different study followed rabbits for up to one year that were treated with either adriamycin, nephrectomy, or combinations thereof (Gadeholt-Gothlin et al. (1995) Urol Res 23:169-173). The rabbits that were treated with adriamycin exhibited signs of nephrotoxicity at relatively low doses.

[0094] Menadione (vitamin K₃) is a fat-soluble vitamin precursor that is converted into menaquinone in the liver. The primary known function of vitamin K is to assist in normal blood clotting, but it may also play a role in bone calcificaton. Menadione is a quinone compound that induces oxidative stress. It has been used as an anticancer agent and radiosensitizer and can produce toxicity in the kidney, lung, heart, and liver. In the kidney, signs of toxicity are dose-dependent, ranging from minor degranulation of tubular cells at lower doses to tubular dilatation, formation of protein casts in the renal tubules, calcium mineralization, vacuolization in the proximal and distal renal tubules, granular degeneration in the cortex and necrosis and apoptosis (Chiou et al., Toxicology (1997) 124(3):193-202).

[0095] Monocrotaline, an alkaloid obtained from Crotalaria spectabilis, a warm-climate garden plant, induces multi-organ toxicity affecting the kidney, heart, liver and lung. This compound is used to induce mesangiolysis in the kidney, to mimic the effects of Habu venom poisoning and hemolytic-uremic syndrome. Renal lesions in rats first appeared in the glomerular capillaries (endothelial cell detachment and adhesion of platelets to the basal lamina), followed by severe edema in the mesangium. Mesangiolysis subsequently occurred, accompanied by dilatation or obliteration of capillaries and necrosis and hemorrhage in the mesangium (Kurozumi et al., Exp Mol Pathol (1983) 39(3):377-386).

[0096] Vancomycin is a polycyclic glycoprotein antibiotic that is used to treat severe systemic infections by beta-lactam-resistant bacteria, in particular, resistant staphylococci. This drug may be given to patients who are allergic to penicillin. Vancomycin can induce renal failure and interstitial nephritis (Physicians Desk Reference 56th Ed., pp. 1970-1971, Medical Economics Co., Montvale, N.J., 2002).

[0097] Sodium chromate, a model compound used to induce liver toxicity, also produces toxic effects in the kidney. Necrosis of the S1 segment of the proximal tubule has been reported, as well as acute renal failure, characterized by increased levels of kininogens in the renal cortex and medulla and in urine and decreased rates of glomerular filtration (Bompart et al., Nephron (1993) 65(4):612-618; Beckwith-Hall et al., Chem Res Toxicol (1998) 11(4):260-272).

[0098] In the kidney, sodium oxalate forms crystals in the urinary tract, resulting in tubular obstruction, and produces calcific kidney stones in humans and in rats. The stones are located on renal papillary surfaces and consist of an organic matrix and crystals of calcium oxalate and/or calcium phosphate. The matrix is intimately associated with the crystals and contains substances that both promote and inhibit calcification: osteopontin, Tamm-Horsfall protein, bikunin and prothrombin fragment 1. Rats with these stones show decreased urine levels of magnesium and citrate, and the same is believed to occur in humans. Males of both species tend to develop calcium oxalate kidney stones, whereas females tend to form calcium phosphate stones (Khan, World J Urol (1997) 15(4):236-243).

[0099] Hexachloro-1,2-butadiene (HCBD) is a solvent that forms toxic conjugates and metabolites with glutathione, cysteine and N-acetyl cysteine. These then cause damage to the S1, S2 and S3 (pars recta) segments of the proximal tubules in the outer medulla of the kidney. Mitochondrial swelling has been observed in the S1 and S2 segments, although most of the pathological changes occur in the S2 and S3 segments (loss of brush boarder and cellular necrosis in S2, necrosis in S3). In rats, HCBD is about four times more toxic to females than to males (Ishmael et al., Toxicol Pathol (1986) 14(2):258-262; Ishmael et al., J Pathol (1982) 138(2):99-113).

[0100] Chloroform (CHCl₃) is widely used in the manufacture of drugs, cosmetics, plastics and cleaning agents and is a contaminant by-product in chlorinated drinking water. Chloroform was also an early anesthetic used in humans, and, therefore, much is known regarding its toxicity. Exposure can induce liver and kidney damage and cardiac arrthymias.

[0101] Toxic levels of exposure in rodents are carcinogenic due to the chronic cycle of cell injury and repair that is induced, rather than because of direct genotoxic action. The injury to the liver and kidney are thought to occur by two different mechanisms related to its metabolism in the target organ. Studies have shown that the extent of liver and kidney damage and necrosis relates multiple factors including sex, strain, route of exposure and the vehicle used. In the kidney, biotransformation of chloroform by cytochrome P450 produces reactive intermediates, which damage mainly the renal proximal tubules. Typical signs of nephrotoxicity include proteinuria, glucosuria and increased BUN levels (Casarett & Doull's Toxicology: The Basic Science of Poisons 6th Ed., Klaasen, ed., Chap. 14, pp. 503-508, McGraw-Hill, New York, 2001; Smith et al., Toxicol Appl Pharmacol 70:467-479, 1983).

[0102] Diclofenac, a non-steroidal anti-inflammatory drug, is commonly administered to patients suffering from rheumatoid arthritis, osteoarthritis, and ankylosing spondylitis. Following oral administration, diclofenac is rapidly absorbed and then metabolized in the liver by cytochrome P450 isozyme of the CYC2C subfamily (Goodman & Gilman's The Pharmacological Basis of Therapeutics 9^{th} Ed., Hardman et al., eds., p. 637, McGraw Hill, New York, 1996). In addition, diclofenac is used topically to treat pain due to corneal damage (Jayamanne et al., Eye 11(Pt. 1):79-83, 1997; Dornic et al., Am J. Ophthalmol 125(5):719-721, 1998).

[0103] Metabolism of diclofenac in kidney tissue produces reactive oxygen species that can cause severe oxidative stress and genomic DNA fragmentation. Examination of diverse types of kidney cells for nuclei with apoptotic characteristics showed that such nuclei are found in the linings of the renal proximal and distal tubules. Additional toxic effects include elevated levels of BUN, malondialdehyde (MDA), SOD, and activated Ca²⁺—Mg²⁺-endonuclease (Hickey et al., Free Radic Biol Med (2001) 31(2):139-152).

[0104] Thioacetamide's only significant commercial use is as a replacement for hydrogen sulfide in qualitative analyses (IARC, Vol. 7, 1974). It has also been used as an organic solvent in the leather, textile and paper industries, as an accelerator in the vulcanization of buna rubber, and as a stabilizer of motor fuel. The primary routes of human exposure are inhalation and skin contact with products in which thioacetamide was used as a solvent (9th Report on Carcinogens, U.S. Dept. of Health and Human Services, Public Health Service, National Toxicology Program, http://ehp.niehs.nih.gov/roc/toc9.html).

[0105] In exposed rats, thioacetamide was shown to accumulate in the liver and kidney, resulting in elevated levels of serum total bilirubin, aspartate aminotransferase, alanine aminotransferase, BUN, creatinine and TNFα. Impaired clearance of the toxin and increased secretion of TNFα are related to the progression of toxic effects in the liver and kidney (Nakatani et al., Liver (2001) 21(1):64-70). Additional histological changes in kidney tissue include glomerular tuft collapse and interstitial haemorrhage (Caballero et al., Gut (2001) 48(1):34-40).

[0106] Amphotericin B is widely used for severe life-threatening fungal infections. Its use is limited by a dose-dependent nephrotoxicity manifested by a reduction in glomerular filtration rate and tubular dysfunction. Elevated creatinine levels associated with amphotericin B are not only a marker for renal dysfunction but are also linked to the use of hemodialysis and a higher mortality rates. Therefore amphotericin B nephrotoxicity is not a benign complication and its prevention is essential (Deray et al. (2002), Nephrologie 23(3):119-122).

[0107] Carbon tetrachloride is a common organic solvent largely employed to make chlorofluorocarbon propellants and refrigerants, though this use has been declining steadily. Other uses include: as dry cleaning agent and fire extinguisher, in making nylon, as a solvent for rubber cement, soaps, and insecticides. In a study in rats, carbon tetrachloride has been shown to produce nephrotoxicity. Significant increases in kidney superoxide dismutase and catalase activities and a significant decrease in glutathione peroxidase activity, as well as glomerular and tubular alterations in the renal cortex, have been observed in carbon tetrachloride-treated rats (Ozturk et al. (2003), Urology 62(2):353-356).

[0108] Ciprofibrate, a lipid regulating drug that decreases serum triglyceride levels and increases serum HDL cholesterol levels, along with other fibrate drugs, has been reported to induce renal dysfunction. Patients taking these drugs exhibited elevated plasma creatinine and urea levels (Broeders et al. (2000), Nephrol Dial Transplant 15(12):1993-1999).

[0109] Cyclosporin A is an immunosuppressant routinely given to organ transplant patients has been shown to cause kidney damage and hypertension. Its nephrotoxicity has been attributed primarily to renal haemodynamic alterations caused by afferent arteriolar vasoconstriction. Its toxic effects are also characterized by pre-glomerular disturbances and interstitial injury that may occur independently of haemodynamic changes. Given the high lipophilic activity of cyclosporin A, direct tubular injury is likely to contribute to nephrotoxicity (Carvalho da Costa et al. (2003) Nephrol Dial Transplant 18(11):2262-2268).

[0110] Dantrolene, a muscle relaxant, is used to treat spasticity or muscle spasms associated with conditions such as spinal cord injuries, stroke, multiple sclerosis and cerebral palsy.

[0111] Ethylene glycol is a compound used to make antifreeze and de-icing solutions for cars, airplanes, and boats; to make polyester compounds; and as solvents in the paint and plastics industries. Ethylene glycol is also an ingredient in photographic developing solutions, hydraulic brake fluids and in inks used in stamp pads, ballpoint pens, and print shops. Ethylene glycol intoxication produces multisystem organ injury, including acute renal failure and damage to the proximal tubules, via the action of toxic metabolites, in particular glycoaldehyde and glyoxylate. These compounds caused ATP depletion, LDH degradation and release and phospholipid degradation. In addition, the low solubility of ethylene glycol metabolites causes crystal formation within the tubular lumen, contributing to a reduced glomerular filtration rate that in turn leads to renal failure (Poldeski et al. (2001), Am J Kidney Dis 38(2):339-348; Van Vleet et al. (2003), Semin Nephrol 23(5):500-508).

[0112] Meloxicam is a non-steroidal anti-inflammatory drug (NSAID) that has hemodynamic (functional) side effects and idiosyncratic side effects on the kidney. The common link in both types of side effects seems to be renal ischemia related to prostaglandin synthesis inhibition. The key enzymes in this processes are the cyclooxygenases COX-1 and COX-2. Although COX-2 inhibition produces the antiinflammatory effect of NSAIDs, COX-1 inhibition produces gastrotoxicity (ulcers and gastrointestinal bleeding) and nephrotoxicity (Fackovcova et al. (2000), Bratisl Lek Listy 101(8):417-422).

[0113] Olsalazine, an anti-inflammatory drug, is used to treat ulcerative colitis (inflamed bowel). Studies in the rat have shown the kidney to be the major target organ of toxicity, where interstitial nephritis and tubular necrosis were observed. In longer term and higher dose studies, pelvic dilatation, focal mineral deposition, transitional cell hyperplasia, and congestion and/or haemorrhage and fibrosis were seen (Medsafe Data Sheets, http://www.medsafe.govt.nz/profs/Datasheet/DSForm.asp).

[0114] Pentamidine is used in the prevention and treatment of pneumocystis carinii pneumonia (PCP). It is also used as an antiparasitic agent for the treatment of parasites. Pentamidine is typically used when a person has experienced adverse effects or toxicity to other drugs, such as trimethoprim-sulfamethoxazole (TMP-SMX) or dapsone. Renal side-effects are frequently observed after parenteral administration of pentamidine. In studies in rats, nephrotoxicity was assessed by measuring urinary loss of tubular cells, malate dehydrogenase activity and creatinine clearance. The tubular toxicity of pentamidine appears to be dose-related and reversible (Feddersen et al. (1991) J Antimicrob Chemother 28(3):437-446.)

[0115] The analgesic drug phenacetin, a NSAID, was taken off the market in the United States in 1983 for causing analgesic-associated nephropathy (AAN) and subsequent end-stage renal disease. A metabolite of phenacetin is acetominophen (Tylenol®) which can also have toxic effects on the kidney. The NSAIDs exert their anti-inflammatory and fever-lowering effects by inhibiting cyclooxygenases (COX-1 and COX-2), enzymes responsible for the production of prostaglandins. Prostaglandins are not key renal blood flow mediators in healthy people with normal kidneys, but in people with a decreased blood volume or circulation problems, the kidney depends on the dilating effect on renal blood vessels of the prostaglandins to maintain renal blood flow, which is critical to maintaining renal function. Because NSAIDs decrease prostaglandin production, people at greatest risk for renal toxicity are those who already have these problems, such as those using diuretics or those suffering from dehydration, heart failure or liver failure. Inhibition of prostaglandin synthesis by NSAIDs is also responsible for electrolyte disturbances such as increased potassium and sodium blood levels and decreased secretion of aldosterone, whose major function is to maintain blood volume when blood pressure drops. Because prostaglandins facilitate sodium excretion, some patients also may experience sodium retention when taking NSAIDs, causing edema and elevated blood pressure and exacerbating the symptoms of heart failure. People at greatest risk are those with diabetes, renal disease, circulatory complications and advanced age (Dilanchian (2002), NurseWeek, http://www.nurseweek.com/ce/ce80a.asp).

[0116] Propyleneimine (2-methyl-aziridine) is used as an intermediate in the paper, textile, rubber, and pharmaceutical industries. It is severely irritating to the eyes and upper respiratory tract from acute (short-term) inhalation exposure in humans and is also known to cause necrosis in the renal papillae. Clinical signs of papillary toxicity are decreased urine levels of succinate and citrate elevated levels of creatine (Holmes et al. (1997) Comp Biochem Physiol C Pharmacol Toxicol Endocrinol 116(2):125-134).

[0117] Semustine (MeCCNU) is an anti-cancer drug has been shown to produce proximal tubule injury and papillary necrosis in rats. Progressive nephropathy, which was delayed in onset, and characterized by polyuria, enzymuria, accumulations of organic ions and decreased urine concentrating ability was observed. Administration of semustine also lead to karyomegaly in the collecting ducts in the renal medulla (Kramer et al. (1986), Toxicol Appl Pharmacol 82(3):540-550).

[0118] Suramin is an anti-parasitic drug and reverse transcriptase inhibitor that is used to treat metastatic cancer. This compound is known to inhibit the binding of growth factors (e.g., epidermal growth factor (EGF), platelet-derived growth factor (PDGF) and tumor growth factor-beta (TGF-beta)) to their receptors and thus antagonize the ability of these factors to stimulate growth of tumor cells in vitro. Experiments in rats have shown that the renal parenchyma is adversely affected by exposure to the drug. Marked and widespread alterations were detected in both cortex and medulla, indicating that suramin induces severe chronic renal damage in rats (Soldani et al. (1992) In Vivo 6(6):617-620).

[0119] Tacrolimus is another immunosuppressant routinely given to organ transplant patients. In the kidneys, proximal tubular epithelial cells (PTEC) tend to undergo apoptosis in response to immunosuppressors such as tacrolimus and participate in the onset of several renal diseases. Immunosuppressors probably induce apoptosis through a mechanism that involves the irreversible opening of the mitochondrial permeability transition pore. Activation of caspases 3 and 7 has also been observed. Apoptosis in the proximal tubules may contribute to the renal toxicity that is observed in the course of immunosuppressive therapy.

[0120] Toxicity Prediction and Modeling

[0121] The genes and gene expression information (including Tox Group Mean, Non-tox Group Mean, LDA score and PLS score for each gene), gene expression profiles, as well as the portfolios and subsets of the genes provided in Tables 1-5N, may be used to predict at least one toxic effect, including the nephrotoxicity of a test or unknown compound. As used, herein, at least one toxic effect includes, but is not limited to, a detrimental change in the physiological status of a cell or organism. The response may be, but is not required to be, associated with a particular pathology, such as tissue necrosis. Accordingly, the toxic effect includes effects at the molecular and cellular level. Nephrotoxicity is an effect as used herein and includes but is not limited to the pathologies of nephritis, tubular toxicity, kidney necrosis, glomerular and tubular injury, and focal segmental glomerulosclerosis. As used herein, a gene expression profile comprises any quantitative representation of the expression of at least one mRNA species in a cell sample or population and includes profiles made by various methods such as differential display, PCR, microarray and other hybridization analysis, etc.

[0122] In general, assays to predict the toxicity or nephrotoxicity of a test agent (or compound or multi-component composition) comprise the steps of exposing a cell population to the test compound, assaying or measuring the level of relative or absolute gene expression of one or more of the genes in Tables 1-5N and comparing the identified expression level(s) to the expression levels or other representations of expression levels disclosed in the Tables and database(s) disclosed herein. Such gene expression information includes the Tox Group Mean, Non-tox Group Mean, LDA (linear discriminant analysis) score and PLS (partial least squares) score for the genes listed in Tables 5A-5N. Assays may include the measurement of the expression levels of about 2, 3, 4, 5, 6, 7, 8, 9, 10, 15, 20, 25, 30, 50, 75, 100, 200, 500, 1000 or more genes from Tables 1-5N, or ranges of these numbers, such as about 2-10, about 10-20, about 20-50, about 50-100, about 100-200, about 200-500 or about 500-1000 genes from Tables 1-5N. Assays for toxicity prediction may also include the measurement of nearly all the genes in Tables 1-5N. “Nearly all” the genes may be considered to mean at least 80% of the genes in any one of or all of Tables 1-5N.

[0123] In some methods of the invention, the gene expression level for a gene or genes induced by the test agent, compound or compositions may be comparable to the levels found in the Tables or databases disclosed herein if the expression level varies within a factor of about 2, about 1.5 or about 1.0 fold. In some cases, the expression levels are comparable if the agent induces a change in the expression of a gene in the same direction (e.g., up or down) as a reference toxin.

[0124] In other methods of the invention, an RMA (robust multi-array average) fold-change value for the gene or genes of a gene expression profile using data from a test compound-exposed sample and from a control vehicle-exposed sample is calculated (see Irizarry et al. (2003), “Summaries of Affymetrix GeneChip probe level data,” Nucl Acids Res 31(4):e15, 8 pp.; and Irizarry et al. (2003), “Exploration, normalization, and summaries of high density oligonucleotide array probe level data,” Biostatistics 4(2): 249-264, both of which are incorporated herein by reference in their entirety). The RMA fold-change value may then be multiplied on a gene-by-gene basis by a PLS weight (or PLS score, see Table 5N) for each gene and these resulting values can be summed across all the genes or across a selected set of genes. This sum creates a single predictive score for the sample. Comparison of this predictive score with a cut-off value, as provided herein, indicates whether or not the test compound has induced at least one toxic response.

[0125] The cell population that is exposed to the test agent, compound or composition may be exposed in vitro or in vivo. For instance, cultured or freshly isolated renal cells, in particular rat renal cells, may be exposed to the agent under standard laboratory and cell culture conditions. In another assay format, in vivo exposure may be accomplished by administration of the agent to a living animal, for instance a laboratory rat.

[0126] Procedures for designing and conducting toxicity tests in in vitro and in vivo systems are well known, and are described in many texts on the subject, such as Loomis et al., Loomis's Esstentials of Toxicology, 4th Ed., Academic Press, New York, 1996; Echobichon, The Basics of Toxicity Testing, CRC Press, Boca Raton, 1992; Frazier, editor, In Vitro Toxicity Testing, Marcel Dekker, New York, 1992; and the like.

[0127] In in vitro toxicity testing, two groups of test organisms are usually employed: One group serves as a control and the other group receives the test compound in a single dose (for acute toxicity tests) or a regimen of doses (for prolonged or chronic toxicity tests). Because, in some cases, the extraction of tissue as called for in the methods of the invention requires sacrificing the test animal, both the control group and the group receiving compound must be large enough to permit removal of animals for sampling tissues, if it is desired to observe the dynamics of gene expression through the duration of an experiment.

[0128] In setting up a toxicity study, extensive guidance is provided in the literature for selecting the appropriate test organism for the compound being tested, route of administration, dose ranges, and the like. Water or physiological saline (0.9% NaCl in water) is the solute of choice for the test compound since these solvents permit administration by a variety of routes. When this is not possible because of solubility limitations, vegetable oils such as corn oil or organic solvents such as propylene glycol may be used.

[0129] Regardless of the route of administration, the volume required to administer a given dose is limited by the size of the animal that is used. It is desirable to keep the volume of each dose uniform within and between groups of animals. When rats or mice are used, the volume administered by the oral route generally should not exceed about 0.005 ml per gram of animal. Even when aqueous or physiological saline solutions are used for parenteral injection the volumes that are tolerated are limited, although such solutions are ordinarily thought of as being innocuous. The intravenous LD₅₀ of distilled water in the mouse is approximately 0.044 ml per gram and that of isotonic saline is 0.068 ml per gram of mouse. In some instances, the route of administration to the test animal should be the same as, or as similar as possible to, the route of administration of the compound to man for therapeutic purposes.

[0130] When a compound is to be administered by inhalation, special techniques for generating test atmospheres are necessary. The methods usually involve aerosolization or nebulization of fluids containing the compound. If the agent to be tested is a fluid that has an appreciable vapor pressure, it may be administered by passing air through the solution under controlled temperature conditions. Under these conditions, dose is estimated from the volume of air inhaled per unit time, the temperature of the solution, and the vapor pressure of the agent involved. Gases are metered from reservoirs. When particles of a solution are to be administered, unless the particle size is less than about 2 μm the particles will not reach the terminal alveolar sacs in the lungs. A variety of apparatuses and chambers are available to perform studies for detecting effects of irritant or other toxic endpoints when they are administered by inhalation. The preferred method of administering an agent to animals is via the oral route, either by intubation or by incorporating the agent in the feed.

[0131] When the agent is exposed to cells in vitro or in cell culture, the cell population to be exposed to the agent may be divided into two or more subpopulations, for instance, by dividing the population into two or more identical aliquots. In some preferred embodiments of the methods of the invention, the cells to be exposed to the agent are derived from kidney tissue. For instance, cultured or freshly isolated rat renal cells may be used.

[0132] The methods of the invention may be used generally to predict at least one toxic response, and, as described in the Examples, may be used to predict the likelihood that a compound or test agent will induce various specific kidney pathologies, such as nephritis, kidney necrosis, glomerular and tubular injury, focal segmental glomerulosclerosis, or other pathologies associated with at least one of the toxins herein described. The methods of the invention may also be used to determine the similarity of a toxic response to one or more individual compounds. In addition, the methods of the invention may be used to predict or elucidate the potential cellular pathways influenced, induced or modulated by the compound or test agent due to the similarity of the expression profile compared to the profile induced by a known toxin (see Tables 1-5N). In particular, Table 2 provides a description of metabolic pathways in which each listed gene is involved.

[0133] Building a Database for Toxicity Prediction—RMA/PLS

[0134] In the present invention, a toxicity study or “tox study” comprises a set of cell or tissue samples from rats. These samples are organized into cohorts by test compound, time (time from initial test compound dosage at which the rats were sacrificed), and dose (amount of test compound administered). All cohorts in a tox study share the same vehicle control. For example, a cohort may be a set of samples from rats that were treated with acyclovir for 6 hours at a high dosage (100 mg/kg). A time-matched vehicle cohort is a set of samples that serve as controls for treated animals within a tox study, e.g., for 6-hour acyclovir-treated high dose samples the time-matched vehicle cohort would be the 6-hour vehicle-treated samples with that study.

[0135] A toxicity database or “tox database” is a set of tox studies that comprises a reference database. The reference database includes data from rat tissue and cell samples from rats that were treated with different test compounds at different dosages and exposed to the test compounds for varying lengths of time. RMA, or robust multi-array average, is an algorithm that converts raw fluorescence intensities, such as those derived from hybridization of sample nucleic acids to an Affymetrix GeneChip®, into expression values, one value for each gene fragment on a chip (Irizarry et al. (2003), Nucleic Acids Res. 31(4):e15, 8 pp.). RMA produces values on a log2 scale, typically between 4 and 12 for genes that are expressed significantly above or below control levels. These RMA values can be positive or negative and are centered around zero for a fold-change of about 1. PLS, or Partial Least Squares, is a modeling algorithm that takes as inputs a matrix of predictors and a vector of supervised scores to generate a set of prediction weights for each of the input predictors (Nguyen et al. (2002), Bioinformatics 18:39-50). These prediction weights can be converted to PLS scores to indicate the ability of each analyzed gene to predict a toxic response. RMA generates a matrix of gene expression values that can be subjected to PLS to produce a model for prediction of toxic responses, e.g., a model for predicting kidney toxicity.

[0136] Although other algorithms for analyzing DNA microarrays are known the art, present inventors have found that the combination of RMA and PLS provides greater accuracy in sample measurements and improved ability to use external data (data from tox studies that have not been added to a tox database). In RMA/PLS models, it was found that external data sets that may be viewed as incompatible according to other algorithms have little impact on the ability of the model to predict a toxic response if these data sets are added to the model. Consequently, an external data set may not require an assessment of compatibility. Additionally, this model allows all sample time points to be used, as all time points for high-dose toxin-treated samples are compared to all time points for non-toxin-treated samples, negative controls, vehicle control and low-dose-treated samples. Further, the model is not affected by the distribution of genes in a sample, and the rates of true positive samples are increased. Using these algorithms, evaluation of the similarity of test compounds is also improved, because a model containing a correlation matrix is generated, rather than separate models for each test compound.

[0137] Building a Database for Toxicity Prediction—MAS/LDA

[0138] In some embodiments of the present invention, a database for predicting kidney toxicity may be built from gene expression information from DNA microarrays that was generated by using the Affymetrix® MAS4 or MAS5 algorithms. These gene expression values are derived from fluorescence intensity measurements of probe pairs, a perfect match (PM) and a mismatch (MM), after hybridization to a target sequence. The data are converted to a log2 scale and are corrected for background and normalized (see Irizarry et al., Nucl Acids Res, supra). Linear discriminant analysis (LDA) methods may then be applied to identify the genes in a gene expression profile that have the best ability to predict a toxic response. LDA is a classical statistical approach for classifying samples of unknown classes, based on training samples with known classes. LDA has been previously applied to sample classification of microarray data (Hakak et al. (2001), Proc Natl Acad Sci USA 98(8):4746-4751; Dudoit et al. (2002), J Am Statistical Association, 97(457):77-87) and can be used to identify genes that are differentially expressed (up- or down-regulated) in pairwise comparisons. LDA seeks the linear combination of variables that maximizes the ratio of between-group variance and within-group variance by using grouping information. For two groups, the linear weights in LDA depend on how a gene separates in the two groups and how a gene correlates with other genes.

[0139] Diagnostic Uses for the Toxicity Markers

[0140] As described above, the genes and gene expression information or portfolios of the genes with their expression information as provided in Tables 1-5N may be used as diagnostic markers for the prediction or identification of the physiological state of tissue or cell sample that has been exposed to a compound or to identify or predict the toxic effects of a compound or agent. For instance, a tissue sample, such as kidney tissue, or a sample of peripheral blood cells or some other easily obtainable tissue, may be assayed by any of the methods described above, and the expression levels from a gene or genes from Tables 1-5N may be compared to the expression levels or related data found in tissues or cells exposed to the toxins described herein. These methods may result in the diagnosis of a physiological state in the cell or may be used to identify the potential toxicity of a compound, for instance a new or unknown compound or agent. The comparison of expression data, as well as available sequence or other information may be done by researcher or diagnostician or may be done with the aid of a computer and databases as described below.

[0141] In another format, the levels of a gene(s) of Tables 1-5N, its encoded protein(s), or any metabolite produced by the encoded protein may be monitored or detected in a sample, such as a bodily tissue or fluid sample to identify or diagnose a physiological state of an organism. Such samples may include any tissue or fluid sample, including urine, blood and easily obtainable cells such as peripheral lymphocytes.

[0142] Use of the Markers for Monitoring Toxicity Progression

[0143] As described above, the genes and gene expression information provided in Tables 1-5N may also be used as markers for the monitoring of toxicity progression, such as that found after initial exposure to a drug, drug candidate, toxin, pollutant, etc. For instance, a tissue or cell sample may be assayed by any of the methods described above, and the expression levels from a gene or genes from Tables 1-5N may be compared to the expression levels or related data found in tissue or cells exposed to the renal toxins described herein. The comparison of the expression data, as well as available sequence or other information may be done by a researcher or diagnostician or may be done with the aid of a computer and databases.

[0144] Use of the Toxicity Markers for Drug Screening

[0145] According to the present invention, the genes identified in Tables 1-5N may be used as markers or drug targets to evaluate the effects of a candidate drug, chemical compound or other agent on a cell or tissue sample. The genes may also be used as drug targets to screen for agents that modulate their expression and/or activity. In various formats, a candidate drug or agent can be screened for the ability to stimulate the transcription or expression of a given marker or markers or to down-regulate or counteract the transcription or expression of a marker or markers. According to the present invention, one can also compare the specificity of a drug's effects by looking at the number of markers which the drug induces and comparing them. More specific drugs will have less transcriptional targets. Similar sets of markers identified for two drugs may indicate a similarity of effects.

[0146] Assays to monitor the expression of a marker or markers as defined in Tables 1-5N may utilize any available means of monitoring for changes in the expression level of the nucleic acids of the invention. As used herein, an agent is said to modulate the expression of a nucleic acid of the invention if it is capable of up- or down-regulating expression of the nucleic acid in a cell.

[0147] In one assay format, gene chips containing probes to one, two or more genes from Tables 1-5N may be used to directly monitor or detect changes in gene expression in the treated or exposed cell. Cell lines, tissues or other samples are first exposed to a test agent and in some instances, a known toxin, and the detected expression levels of one or more, or preferably 2 or more of the genes of Tables 1-5N are compared to the expression levels or related data of those same genes exposed to a known toxin alone. Compounds that modulate the expression patterns of the known toxin(s) would be expected to modulate potential toxic physiological effects in vivo. The genes in Tables 1-5N are particularly appropriate markers in these assays as they are differentially expressed in cells upon exposure to a known renal toxin. Table 1 discloses those genes that are differentially expressed upon exposure to the named toxins and their corresponding GenBank Accession numbers and Unigene cluster titles. Table 2 indicates the metabolic pathways in which some of the genes in Table 1 function. Table 3 discloses the human homologues of some of the differentially expressed genes in Tables 1 and 2.

[0148] In another format, cell lines that contain reporter gene fusions between the open reading frame and/or the transcriptional regulatory regions of a gene in Tables 1-5N and any assayable fusion partner may be prepared. Numerous assayable fusion partners are known and readily available including the firefly luciferase gene and the gene encoding chloramphenicol acetyltransferase (Alam et al. (1990), Anal Biochem 188:245-254). Cell lines containing the reporter gene fusions are then exposed to the agent to be tested under appropriate conditions and time. Differential expression of the reporter gene between samples exposed to the agent and control samples identifies agents which modulate the expression of the nucleic acid.

[0149] Additional assay formats may be used to monitor the ability of the agent to modulate the expression of a gene identified in Tables 1-5N. For instance, as described above, mRNA expression may be monitored directly by hybridization of probes to the nucleic acids of the invention. Cell lines are exposed to the agent to be tested under appropriate conditions and time, and total RNA or mRNA is isolated by standard procedures such those disclosed in Sambrook et al. (Molecular Cloning: A Laboratory Manual, 2nd Ed. Cold Spring Harbor Laboratory Press, Cold Spring Harbor, N.Y., 1989).

[0150] In another assay format, cells or cell lines are first identified which express the gene products of the invention physiologically. Cells and/or cell lines so identified would be expected to comprise the necessary cellular machinery such that the fidelity of modulation of the transcriptional apparatus is maintained with regard to exogenous contact of agent with appropriate surface transduction mechanisms and/or the cytosolic cascades. Further, such cells or cell lines may be transduced or transfected with an expression vehicle (e.g., a plasmid or viral vector) construct comprising an operable non-translated 5′-promoter containing end of the structural gene encoding the gene products of Tables 1-5N fused to one or more antigenic fragments or other detectable markers, which are peculiar to the instant gene products, wherein said fragments are under the transcriptional control of said promoter and are expressed as polypeptides whose molecular weight can be distinguished from the naturally occurring polypeptides or may further comprise an immunologically distinct or other detectable tag. Such a process is well known in the art (see Sambrook et al., supra).

[0151] Cells or cell lines transduced or transfected as outlined above are then contacted with agents under appropriate conditions; for example, the agent comprises a pharmaceutically acceptable excipient and is contacted with cells comprised in an aqueous physiological buffer such as phosphate buffered saline (PBS) at physiological pH, Eagles balanced salt solution (BSS) at physiological pH, PBS or BSS comprising serum or conditioned media comprising PBS or BSS and/or serum incubated at 37° C. Said conditions may be modulated as deemed necessary by one of skill in the art. Subsequent to contacting the cells with the agent, said cells are disrupted and the polypeptides of the lysate are fractionated such that a polypeptide fraction is pooled and contacted with an antibody to be further processed by immunological assay (e.g., ELISA, immunoprecipitation or Western blot). The pool of proteins isolated from the agent-contacted sample is then compared with the control samples (no exposure and exposure to a known toxin) where only the excipient is contacted with the cells and an increase or decrease in the immunologically generated signal from the agent-contacted sample compared to the control is used to distinguish the effectiveness and/or toxic effects of the agent.

[0152] Another embodiment of the present invention provides methods for identifying agents that modulate at least one activity of a protein(s) encoded by the genes in Tables 1-5N. Such methods or assays may utilize any means of monitoring or detecting the desired activity.

[0153] In one format, the relative amounts of a protein (Tables 1-5N) between a cell population that has been exposed to the agent to be tested compared to an un-exposed control cell population and a cell population exposed to a known toxin may be assayed. In this format, probes such as specific antibodies are used to monitor the differential expression of the protein in the different cell populations. Cell lines or populations are exposed to the agent to be tested under appropriate conditions and time. Cellular lysates may be prepared from the exposed cell line or population and a control, unexposed cell line or population. The cellular lysates are then analyzed with the probe, such as a specific antibody.

[0154] Agents that are assayed in the above methods can be randomly selected or rationally selected or designed. As used herein, an agent is said to be randomly selected when the agent is chosen randomly without considering the specific sequences involved in the association of a protein of the invention alone or with its associated substrates, binding partners, etc. An example of randomly selected agents is the use a chemical library or a peptide combinatorial library, or a growth broth of an organism.

[0155] As used herein, an agent is said to be rationally selected or designed when the agent is chosen on a nonrandom basis which takes into account the sequence of the target site and/or its conformation in connection with the agent's action. Agents can be rationally selected or rationally designed by utilizing the peptide sequences that make up these sites. For example, a rationally selected peptide agent can be a peptide whose amino acid sequence is identical to or a derivative of any functional consensus site.

[0156] The agents of the present invention can be, as examples, peptides, small molecules, vitamin derivatives, as well as carbohydrates. Dominant negative proteins, DNAs encoding these proteins, antibodies to these proteins, peptide fragments of these proteins or mimics of these proteins may be introduced into cells to affect function. “Mimic” used herein refers to the modification of a region or several regions of a peptide molecule to provide a structure chemically different from the parent peptide but topographically and functionally similar to the parent peptide (see G. A. Grant in: Molecular Biology and Biotechnology, Meyers, ed., pp. 659-664, VCH Publishers, New York, 1995). A skilled artisan can readily recognize that there is no limit as to the structural nature of the agents of the present invention.

[0157] Nucleic Acid Assay Formats

[0158] The genes identified as being differentially expressed upon exposure to a known renal toxin (Tables 1-5N) may be used in a variety of nucleic acid detection assays to detect or quantify the expression level of a gene or multiple genes in a given sample. The genes described in Tables 1-5N may also be used in combination with one or more additional genes whose differential expression is associate with toxicity in a cell or tissue. In preferred embodiments, the genes in Tables 1-5N may be combined with one or more of the genes described in prior and related application Ser. No. 10/301,856, filed Nov. 22, 2002; Ser. No. 10/152,319, filed May 22, 2002; 60/292,335, filed May 22, 2001; 60/297,523, filed Jun. 13, 2001; 60/298,925, filed Jun. 19, 2001; 60/303,810, filed Jul. 10, 2001; 60/303,807, filed Jul. 10, 2001; 60/303,808, filed Jul. 10, 2001; 60/315,047, filed Aug. 28, 2001; 60/324,928, filed Sep. 27, 2001; 60/330,867, filed Nov. 1, 2001; 60/330,462, filed Oct. 22, 2001; 60/331,805, filed Nov. 21, 2001; 60/336,144, filed Dec. 6, 2001; 60/340,873, filed Dec. 19, 2001; 60/357,843, filed Feb. 21, 2002; 60/357,842, filed Feb. 21, 2002; 60/357,844, filed Feb. 21, 2002; 60/364,134; 60/370,206 filed Mar. 15, 2002, filed Apr. 8, 2002; 60/370,247, filed Apr. 8, 2002; 60/370,144, filed Apr. 8, 2002; 60/371,679, filed Apr. 12, 2002; and 60/372,794, filed Apr. 17, 2002, all of which are incorporated by reference on page 1 of this application.

[0159] Any assay format to detect gene expression may be used. For example, traditional Northern blotting, dot or slot blot, nuclease protection, primer directed amplification, RT-PCR, semi- or quantitative PCR, branched-chain DNA and differential display methods may be used for detecting gene expression levels. Those methods are useful for some embodiments of the invention. In cases where smaller numbers of genes are detected, amplification based assays may be most efficient. Methods and assays of the invention, however, may be most efficiently designed with hybridization-based methods for detecting the expression of a large number of genes.

[0160] Any hybridization assay format may be used, including solution-based and solid support-based assay formats. Solid supports containing oligonucleotide probes for differentially expressed genes of the invention can be filters, polyvinyl chloride dishes, particles, beads, microparticles or silicon or glass based chips, etc. Such chips, wafers and hybridization methods are widely available, for example, those disclosed by Beattie (WO 95/11755).

[0161] Any solid surface to which oligonucleotides can be bound, either directly or indirectly, either covalently or non-covalently, can be used. A preferred solid support is a high density array or DNA chip. These contain a particular oligonucleotide probe in a predetermined location on the array. Each predetermined location may contain more than one molecule of the probe, but each molecule within the predetermined location has an identical sequence. Such predetermined locations are termed features. There may be, for example, from 2, 10, 100, 1000 to 10,000, 100,000 or 400,000 or more of such features on a single solid support. The solid support, or the area within which the probes are attached may be on the order of about a square centimeter. Probes corresponding to the genes of Tables 1-5N or from the related applications described above may be attached to single or multiple solid support structures, e.g., the probes may be attached to a single chip or to multiple chips to comprise a chip set.

[0162] Oligonucleotide probe arrays for expression monitoring can be made and used according to any techniques known in the art (see for example, Lockhart et al. (1996), Nat Biotechnol 14:1675-1680; McGall et al. (1996), Proc Nat Acad Sci USA 93: 13555-13460). Such probe arrays may contain at least two or more oligonucleotides that are complementary to or hybridize to two or more of the genes described in Tables 1-5N. For instance, such arrays may contain oligonucleotides that are complementary to or hybridize to at least 2, 3, 4, 5, 6, 7, 8, 9, 10, 20, 30, 50, 70, 100 or more of the genes described herein. Preferred arrays contain all or nearly all of the genes listed in Tables 1-5N, or individually, the gene sets of Tables 5A-5N. In a preferred embodiment, arrays are constructed that contain oligonucleotides to detect all or nearly all of the genes in any one of or all of Tables 1-5N on a single solid support substrate, such as a chip.

[0163] The sequences of the expression marker genes of Tables 1-5N are in the public databases. Table 1 provides the GenBank Accession Number or NCBI RefSeq ID for each of the sequences (see www.ncbi.nlm.nih.gov/), as well as the title for the cluster of which gene is part. Table 2 lists the metabolic pathways in which each listed gene functions, while Table 3 provides the gene names and cluster titles for the human homologues of the genes described in Tables 1 and 2. The sequences of the genes in GenBank and/or RefSeq are expressly herein incorporated by reference in their entirety as of the filing date of this application, as are related sequences, for instance, sequences from the same gene of different lengths, variant sequences, polymorphic sequences, genomic sequences of the genes and related sequences from different species, including the human counterparts, where appropriate. These sequences may be used in the methods of the invention or may be used to produce the probes and arrays of the invention. In some embodiments, the genes in Tables 1-5N that correspond to the genes or fragments previously associated with a toxic response may be excluded from the Tables. Table 4 provides the key to the model codes used in Tables 3 and 5A-5L, where each model represents a toxin treatment or a set of pathological effects (disease state) resulting from a toxin treatment. In Tables 5A-5N, the genes that are differentially expressed, i.e., up- or down-regulated, in response to a toxin treatment or in a particular disease state are listed. The expression levels of these genes in samples in which a toxic response was found and in samples in which a toxic response was not found are also indicated.

[0164] As described above, in addition to the sequences of the GenBank Accession Numbers or NCBI Refeq ID's disclosed in the Tables 1-5N, sequences such as naturally occurring variants or polymorphic sequences may be used in the methods and compositions of the invention. For instance, expression levels of various allelic or homologous forms of a gene disclosed in Tables 1-5N may be assayed, including homologs from species other than rat. Any and all nucleotide variations that do not alter the functional activity of a gene listed in the Tables 1-5N, including all naturally occurring allelic variants of the genes herein disclosed, may be used in the methods and to make the compositions (e.g., arrays) of the invention.

[0165] Probes based on the sequences of the genes described above may be prepared by any commonly available method. Oligonucleotide probes for screening or assaying a tissue or cell sample are preferably of sufficient length to specifically hybridize only to appropriate, complementary genes or transcripts. Typically the oligonucleotide probes will be at least about 10, 12, 14, 16, 18, 20 or 25 nucleotides in length. In some cases, longer probes of at least about 30, 40, or 50 nucleotides will be desirable.

[0166] As used herein, oligonucleotide sequences that are complementary to one or more of the genes described in Tables 1-5N refer to oligonucleotides that are capable of hybridizing under stringent conditions to at least part of the nucleotide sequences of said genes. Such hybridizable oligonucleotides will typically exhibit at least about 75% sequence identity at the nucleotide level to said genes, preferably about 80% or 85% sequence identity or more preferably about 90% or 95% or more sequence identity to said genes.

[0167] “Bind(s) substantially” refers to complementary hybridization between a probe nucleic acid and a target nucleic acid and embraces minor mismatches that can be accommodated by reducing the stringency of the hybridization media to achieve the desired detection of the target polynucleotide sequence.

[0168] The terms “background” or “background signal intensity” refer to hybridization signals resulting from non-specific binding, or other interactions, between the labeled target nucleic acids and components of the oligonucleotide array (e.g., the oligonucleotide probes, control probes, the array substrate, etc.). Background signals may also be produced by intrinsic fluorescence of the array components themselves. A single background signal can be calculated for the entire array, or a different background signal may be calculated for each target nucleic acid. In a preferred embodiment, background is calculated as the average hybridization signal intensity for the lowest 5% to 10% of the probes in the array, or, where a different background signal is calculated for each target gene, for the lowest 5% to 10% of the probes for each gene. Of course, one of skill in the art will appreciate that where the probes to a particular gene hybridize well and thus appear to be specifically binding to a target sequence, they should not be used in a background signal calculation. Alternatively, background may be calculated as the average hybridization signal intensity produced by hybridization to probes that are not complementary to any sequence found in the sample (e.g. probes directed to nucleic acids of the opposite sense or to genes not found in the sample such as bacterial genes where the sample is mammalian nucleic acids). Background can also be calculated as the average signal intensity produced by regions of the array that lack any probes at all.

[0169] The phrase “hybridizing specifically to” or “specifically hybridizes” refers to the binding, duplexing, or hybridizing of a molecule substantially to or only to a particular nucleotide sequence or sequences under stringent conditions when that sequence is present in a complex mixture (e.g., total cellular) DNA or RNA.

[0170] Assays and methods of the invention may utilize available formats to simultaneously screen at least about 100, preferably about 1000, more preferably about 10,000 and most preferably about 1,000,000 different nucleic acid hybridizations.

[0171] As used herein a “probe” is defined as a nucleic acid, capable of binding to a target nucleic acid of complementary sequence through one or more types of chemical bonds, usually through complementary base pairing, usually through hydrogen bond formation. As used herein, a probe may include natural (i.e., A, G, U, C, or T) or modified bases (7-deazaguanosine, inosine, etc.). In addition, the bases in probes may be joined by a linkage other than a phosphodiester bond, so long as it does not interfere with hybridization. Thus, probes may be peptide nucleic acids in which the constituent bases are joined by peptide bonds rather than phosphodiester linkages.

[0172] The term “perfect match probe” refers to a probe that has a sequence that is perfectly complementary to a particular target sequence. The test probe is typically perfectly complementary to a portion (subsequence) of the target sequence. The perfect match (PM) probe can be a “test probe”, a “normalization control” probe, an expression level control probe and the like. A perfect match control or perfect match probe is, however, distinguished from a “mismatch control” or “mismatch probe.”

[0173] The terms “mismatch control” or “mismatch probe” refer to a probe whose sequence is deliberately selected not to be perfectly complementary to a particular target sequence. For each mismatch (MM) control in a high-density array there typically exists a corresponding perfect match (PM) probe that is perfectly complementary to the same particular target sequence. The mismatch may comprise one or more bases.

[0174] While the mismatch(es) may be located anywhere in the mismatch probe, terminal mismatches are less desirable as a terminal mismatch is less likely to prevent hybridization of the target sequence. In a particularly preferred embodiment, the mismatch is located at or near the center of the probe such that the mismatch is most likely to destabilize the duplex with the target sequence under the test hybridization conditions.

[0175] The term “stringent conditions” refers to conditions under which a probe will hybridize to its target subsequence, but with only insubstantial hybridization to other sequences or to other sequences such that the difference may be identified. Stringent conditions are sequence-dependent and will be different in different circumstances. Longer sequences hybridize specifically at higher temperatures. Generally, stringent conditions are selected to be about 5° C. lower than the thermal melting point (Tm) for the specific sequence at a defined ionic strength and pH.

[0176] Typically, stringent conditions will be those in which the salt concentration is at least about 0.01 to 1.0 M Na⁺ ion concentration (or other salts) at pH 7.0 to 8.3 and the temperature is at least about 30° C. for short probes (e.g., 10 to 50 nucleotides). Stringent conditions may also be achieved with the addition of destabilizing agents such as formamide.

[0177] The “percentage of sequence identity” or “sequence identity” is determined by comparing two optimally aligned sequences or subsequences over a comparison window or span, wherein the portion of the polynucleotide sequence in the comparison window may optionally comprise additions or deletions (i.e., gaps) as compared to the reference sequence (which does not comprise additions or deletions) for optimal alignment of the two sequences. The percentage is calculated by determining the number of positions at which the identical submit (e.g. nucleic acid base or amino acid residue) occurs in both sequences to yield the number of matched positions, dividing the number of matched positions by the total number of positions in the window of comparison and multiplying the result by 100 to yield the percentage of sequence identity. Percentage sequence identity when calculated using the programs GAP or BESTFIT (see below) is calculated using default gap weights.

[0178] Probe Design

[0179] One of skill in the art will appreciate that an enormous number of array designs are suitable for the practice of this invention. The high density array will typically include a number of test probes that specifically hybridize to the sequences of interest. Probes may be produced from any region of the genes identified in the Tables and the attached representative sequence listing. In instances where the gene reference in the Tables is an EST, probes may be designed from that sequence or from other regions of the corresponding full-length transcript that may be available in any of the sequence databases, such as those herein described. See WO 99/32660 for methods of producing probes for a given gene or genes. In addition, any available software may be used to produce specific probe sequences, including, for instance, software available from Molecular Biology Insights, Olympus Optical Co. and Biosoft International. In a preferred embodiment, the array will also include one or more control probes.

[0180] High density array chips of the invention include “test probes.” Test probes may be oligonucleotides that range from about 5 to about 500, or about 7 to about 50 nucleotides, more preferably from about 10 to about 40 nucleotides and most preferably from about 15 to about 35 nucleotides in length. In other particularly preferred embodiments, the probes are 20 or 25 nucleotides in length. In another preferred embodiment, test probes are double or single strand DNA sequences such as cDNA fragments. DNA sequences are isolated or cloned from natural sources or amplified from natural sources using native nucleic acid as templates. These probes have sequences complementary to particular subsequences of the genes whose expression they are designed to detect. Thus, the test probes are capable of specifically hybridizing to the target nucleic acid they are to detect.

[0181] In addition to test probes that bind the target nucleic acid(s) of interest, the high density array can contain a number of control probes. The control probes may fall into three categories referred to herein as 1) normalization controls; 2) expression level controls; and 3) mismatch controls.

[0182] Normalization controls are oligonucleotide or other nucleic acid probes that are complementary to labeled reference oligonucleotides or other nucleic acid sequences that are added to the nucleic acid sample to be screened. The signals obtained from the normalization controls after hybridization provide a control for variations in hybridization conditions, label intensity, “reading” efficiency and other factors that may cause the signal of a perfect hybridization to vary between arrays. In a preferred embodiment, signals (e.g., fluorescence intensity) read from all other probes in the array are divided by the signal (e.g., fluorescence intensity) from the control probes thereby normalizing the measurements.

[0183] Virtually any probe may serve as a normalization control. However, it is recognized that hybridization efficiency varies with base composition and probe length. Preferred normalization probes are selected to reflect the average length of the other probes present in the array, however, they can be selected to cover a range of lengths. The normalization control(s) can also be selected to reflect the (average) base composition of the other probes in the array, however in a preferred embodiment, only one or a few probes are used and they are selected such that they hybridize well (i.e., no secondary structure) and do not match any target-specific probes.

[0184] Expression level controls are probes that hybridize specifically with constitutively expressed genes in the biological sample. Virtually any constitutively expressed gene provides a suitable target for expression level controls. Typically expression level control probes have sequences complementary to subsequences of constitutively expressed “housekeeping genes” including, but not limited to the actin gene, the transferrin receptor gene, the GAPDH gene, and the like.

[0185] Mismatch controls may also be provided for the probes to the target genes, for expression level controls or for normalization controls. Mismatch controls are oligonucleotide probes or other nucleic acid probes identical to their corresponding test or control probes except for the presence of one or more mismatched bases. A mismatched base is a base selected so that it is not complementary to the corresponding base in the target sequence to which the probe would otherwise specifically hybridize. One or more mismatches are selected such that under appropriate hybridization conditions (e.g., stringent conditions) the test or control probe would be expected to hybridize with its target sequence, but the mismatch probe would not hybridize (or would hybridize to a significantly lesser extent). Preferred mismatch probes contain a central mismatch. Thus, for example, where a probe is a 20 mer, a corresponding mismatch probe will have the identical sequence except for a single base mismatch (e.g., substituting a G, a C or a T for an A) at any of positions 6 through 14 (the central mismatch).

[0186] Mismatch probes thus provide a control for non-specific binding or cross hybridization to a nucleic acid in the sample other than the target to which the probe is directed. For example, if the target is present the perfect match probes should be consistently brighter than the mismatch probes. In addition, if all central mismatches are present, the mismatch probes can be used to detect a mutation, for instance, a mutation of a gene in the accompanying Tables 1-5N. The difference in intensity between the perfect match and the mismatch probe provides a good measure of the concentration of the hybridized material.

[0187] Nucleic Acid Samples

[0188] Cell or tissue samples may be exposed to the test agent in vitro or in vivo. When cultured cells or tissues are used, appropriate mammalian cell extracts, such as liver extracts, may also be added with the test agent to evaluate agents that may require biotransformation to exhibit toxicity. In a preferred format, primary isolates or cultured cell lines of animal or human renal cells may be used.

[0189] The genes which are assayed according to the present invention are typically in the form of mRNA or reverse transcribed mRNA. The genes may or may not be cloned. The genes may or may not be amplified. The cloning and/or amplification do not appear to bias the representation of genes within a population. In some assays, it may be preferable, however, to use polyA+ RNA as a source, as it can be used with less processing steps.

[0190] As is apparent to one of ordinary skill in the art, nucleic acid samples used in the methods and assays of the invention may be prepared by any available method or process. Methods of isolating total mRNA are well known to those of skill in the art. For example, methods of isolation and purification of nucleic acids are described in detail in Chapter 3 of Laboratory Techniques in Biochemistry and Molecular Biology Vol. 24, Hybridization With Nucleic Acid Probes: Theory and Nucleic Acid Probes, P. Tijssen, Ed., Elsevier Press, New York, 1993. Such samples include RNA samples, but also include cDNA synthesized from a mRNA sample isolated from a cell or tissue of interest. Such samples also include DNA amplified from the cDNA, and RNA transcribed from the amplified DNA. One of skill in the art would appreciate that it is desirable to inhibit or destroy RNase present in homogenates before homogenates are used.

[0191] Biological samples may be of any biological tissue or fluid or cells from any organism as well as cells raised in vitro, such as cell lines and tissue culture cells. Frequently the sample will be a tissue or cell sample that has been exposed to a compound, agent, drug, pharmaceutical composition, potential environmental pollutant or other composition. In some formats, the sample will be a “clinical sample” which is a sample derived from a patient. Typical clinical samples include, but are not limited to, sputum, blood, blood-cells (e.g., white cells), tissue or fine needle biopsy samples, urine, peritoneal fluid, and pleural fluid, or cells therefrom. Biological samples may also include sections of tissues, such as frozen sections or formalin fixed sections taken for histological purposes.

[0192] Forming High Density Arrays

[0193] Methods of forming high density arrays of oligonucleotides with a minimal number of synthetic steps are known. The oligonucleotide analogue array can be synthesized on a single or on multiple solid substrates by a variety of methods, including, but not limited to, light-directed chemical coupling, and mechanically directed coupling (see Pirrung, U.S. Pat. No. 5,143,854).

[0194] In brief, the light-directed combinatorial synthesis of oligonucleotide arrays on a glass surface proceeds using automated phosphoramidite chemistry and chip masking techniques. In one specific implementation, a glass surface is derivatized with a silane reagent containing a functional group, e.g., a hydroxyl or amine group blocked by a photolabile protecting group. Photolysis through a photolithographic mask is used selectively to expose functional groups which are then ready to react with incoming 5′ photoprotected nucleoside phosphoramidites. The phosphoramidites react only with those sites which are illuminated (and thus exposed by removal of the photolabile blocking group). Thus, the phosphoramidites only add to those areas selectively exposed from the preceding step. These steps are repeated until the desired array of sequences have been synthesized on the solid surface. Combinatorial synthesis of different oligonucleotide analogues at different locations on the array is determined by the pattern of illumination during synthesis and the order of addition of coupling reagents.

[0195] In addition to the foregoing, additional methods which can be used to generate an array of oligonucleotides on a single substrate are described in PCT Publication Nos. WO 93/09668 and WO 01/23614. High density nucleic acid arrays can also be fabricated by depositing pre-made or natural nucleic acids in predetermined positions. Synthesized or natural nucleic acids are deposited on specific locations of a substrate by light directed targeting and oligonucleotide directed targeting. Another embodiment uses a dispenser that moves from region to region to deposit nucleic acids in specific spots.

[0196] Hybridization

[0197] Nucleic acid hybridization simply involves contacting a probe and target nucleic acid under conditions where the probe and its complementary target can form stable hybrid duplexes through complementary base pairing. See WO 99/32660. The nucleic acids that do not form hybrid duplexes are then washed away leaving the hybridized nucleic acids to be detected, typically through detection of an attached detectable label. It is generally recognized that nucleic acids are denatured by increasing the temperature or decreasing the salt concentration of the buffer containing the nucleic acids. Under low stringency conditions (e.g., low temperature and/or high salt) hybrid duplexes (e.g., DNA:DNA, RNA:RNA, or RNA:DNA) will form even where the annealed sequences are not perfectly complementary. Thus, specificity of hybridization is reduced at lower stringency. Conversely, at higher stringency (e.g., higher temperature or lower salt) successful hybridization tolerates fewer mismatches. One of skill in the art will appreciate that hybridization conditions may be selected to provide any degree of stringency.

[0198] In a preferred embodiment, hybridization is performed at low stringency, in this case in 6×SSPET at 37° C. (0.005% Triton X-100), to ensure hybridization and then subsequent washes are performed at higher stringency (e.g., 1×SSPET at 37° C.) to eliminate mismatched hybrid duplexes. Successive washes may be performed at increasingly higher stringency (e.g., down to as low as 0.25×SSPET at 37° C. to 50° C.) until a desired level of hybridization specificity is obtained. Stringency can also be increased by addition of agents such as formamide. Hybridization specificity may be evaluated by comparison of hybridization to the test probes with hybridization to the various controls that can be present (e.g., expression level control, normalization control, mismatch controls, etc.).

[0199] In general, there is a tradeoff between hybridization specificity (stringency) and signal intensity. Thus, in a preferred embodiment, the wash is performed at the highest stringency that produces consistent results and that provides a signal intensity greater than approximately 10% of the background intensity. Thus, in a preferred embodiment, the hybridized array may be washed at successively higher stringency solutions and read between each wash. Analysis of the data sets thus produced will reveal a wash stringency above which the hybridization pattern is not appreciably altered and which provides adequate signal for the particular oligonucleotide probes of interest.

[0200] Signal Detection

[0201] The hybridized nucleic acids are typically detected by detecting one or more labels attached to the sample nucleic acids. The labels may be incorporated by any of a number of means well known to those of skill in the art. See WO 99/32660.

[0202] Databases

[0203] The present invention includes relational databases containing sequence information, for instance, for the genes of Tables 1-5N, as well as gene expression or related information from tissue or cells exposed to various standard toxins, such as those herein described (see Tables 5A-5N). Databases may also contain information associated with a given sequence or tissue sample such as descriptive information about the gene associated with the sequence information (see Tables 1 and 2), or descriptive information concerning the clinical status of the tissue sample, or the animal from which the sample was derived. The database may be designed to include different parts, for instance a sequence database and a gene expression database. Methods for the configuration and construction of such databases and computer-readable media to which such databases are saved are widely available, for instance, see U.S. Publication No. 2003-0171876 (Ser. No. 10/090,144), filed Mar. 5, 2002, PCT Publication No. WO 02/095659, published Nov. 23, 2002, and U.S. Pat. No. 5,953,727, which are herein incorporated by reference in their entirety. In a preferred embodiment, the database is ToxExpress® marketed by Gene Logic, Inc., Gaithersburg, Md.

[0204] The databases of the invention may be linked to an outside or external database such as GenBank (www.ncbi.nlm.nih.gov/entrez.index.html); KEGG (www.genome.ad.jp/kegg); SPAD (www.grt.kyushu-u.ac.jp/spad/index.html); HUGO (www.gene.ucl.ac.uk/hugo); Swiss-Prot (www.expasy.ch.sprot); Prosite (www.expasy.ch/tools/scnpsit1.html); OMIM (www.ncbi.nlm.nih.gov/omim); and GDB (www.gdb.org). In a preferred embodiment, as described in Tables 1-5N, the external database is GenBank and the associated databases maintained by the National Center for Biotechnology Information (NCBI) (www.ncbi.nlm.nih.gov).

[0205] Any appropriate computer platform, user interface, etc. may be used to perform the necessary comparisons between sequence information, gene expression information and any other information in the database or information provided as an input. For example, a large number of computer workstations are available from a variety of manufacturers. Client/server environments, database servers and networks are also widely available and appropriate platforms for the databases of the invention.

[0206] The databases of the invention may be used to produce, among other things, electronic Northerns (E-NORTHERN™, Gene Logic, Inc., Gaithersburg, Md.) that allow the user to determine the cell type or tissue in which a given gene is expressed and to allow determination of the abundance or expression level of a given gene in a particular tissue or cell.

[0207] The databases of the invention may also be used to present information identifying the expression level in a tissue or cell of a set of genes comprising one or more of the genes in Tables 1-5N, comprising the step of comparing the expression level of at least one gene in Tables 1-5N in a cell or tissue exposed to a test agent to the level of expression of the gene in the database. In one embodiment, such methods may be used to predict the toxic potential of a given compound by comparing the level of expression of a gene or genes in Tables 1-5N from a tissue or cell sample exposed to the test agent to the expression levels found in a control tissue or cell samples exposed to a standard toxin or renal toxin such as those herein described. Such methods may also be used in the drug or agent screening assays as described herein.

[0208] Kits

[0209] The invention further includes kits combining, in different combinations, high-density oligonucleotide arrays, reagents for use with the arrays, protein reagents encoded by the genes of the Tables, signal detection and array-processing instruments, gene expression databases and analysis and database management software described above. The kits may be used, for example, to predict or model the toxic response of a test compound, to monitor the progression of renal disease states, to identify genes that show promise as new drug targets and to screen known and newly designed drugs as discussed above.

[0210] The databases packaged with the kits are a compilation of expression patterns from human or laboratory animal genes and gene fragments (corresponding to the genes of Tables 1-5N). In particular, the database software and packaged information that may contain the databases saved to a computer-readable medium include the expression results of Tables 1-5N that can be used to predict toxicity of a test agent by comparing the expression levels of the genes of Tables 1-5N induced by the test agent to the expression levels presented in Tables 5A-5N. In another format, database and software information may be provided in a remote electronic format, such as a website, the address of which may be packaged in the kit.

[0211] The kits may used in the pharmaceutical industry, where the need for early drug testing is strong due to the high costs associated with drug development, but where bioinformatics, in particular gene expression informatics, is still lacking. These kits will reduce the costs, time and risks associated with traditional new drug screening using cell cultures and laboratory animals. The results of large-scale drug screening of pre-grouped patient populations, pharmacogenomics testing, can also be applied to select drugs with greater efficacy and fewer side-effects. The kits may also be used by smaller biotechnology companies and research institutes who do not have the facilities for performing such large-scale testing themselves.

[0212] Databases and software designed for use with microarrays are discussed in Balaban et al., U.S. Pat. No. 6,229,911, a computer-implemented method for managing information, stored as indexed Tables 1-5N, collected from small or large numbers of microarrays, and U.S. Pat. No. 6,185,561, a computer-based method with data mining capability for collecting gene expression level data, adding additional attributes and reformatting the data to produce answers to various queries. Chee et al., U.S. Pat. No. 5,974,164, disclose a software-based method for identifying mutations in a nucleic acid sequence based on differences in probe fluorescence intensities between wild type and mutant sequences that hybridize to reference sequences.

[0213] Without further description, it is believed that one of ordinary skill in the art can, using the preceding description and the following illustrative examples, make and utilize the compounds of the present invention and practice the claimed methods. The following working examples therefore, specifically point out the preferred embodiments of the present invention, and are not to be construed as limiting in any way the remainder of the disclosure.

### EXAMPLES

### Example 1

### Identification of Toxicity Markers Using Linear Discriminant Analysis (LDA)

[0214] The renal toxins indomethacin, diflunisal, colchicine, chloroform, diclofenac, menadione, sodium chromate, sodium oxalate, thioacetamide, vancomycin, acyclovir, adriamycin, AY-25329, bromoethylamine HBr (BEA), carboplatin, carbon tetrachloride, cephalosporine, cidofovir, cisplatin, citrinin, cyclophosphamide, cyclosporine, gentamicin, hexachloro-1,3-butadiene, hydralazine, ifosfamide, lithium chloride, mercuric chloride, pamindronate, puromycin aminonucleoside (PAN), semustine and sulfadiazine were administered to male Sprague-Dawley rats at various timepoints using administration diluents, protocols and dosing regimes as previously described in the art and previously described in the priority applications discussed above. As negative controls, the compounds ceftazidime, streptomycin, transplatin captopril, phenobarbital, tamoxifen and temozolomide were used. In experiments using toxins A-G, as labeled in Table 4, blood and tissue samples were collected at the following time-points: chloroform (A), thioacetamide (F) and vancomycin (G)—after 6, 24 and 48 hours of exposure; diclofenac (B) and menadione (C)—after 3, 6 and 24 hours of exposure; and sodium chromate (D) and sodium oxalate (E)—after 6, 24 and 72 hours of exposure. For these compounds, no significant changes in the levels of gene expression were found with varying exposure time, i.e., short and long time-points showed the same pattern of differential gene expression. The low and high dose level for each compound are provided in the chart below.

| | Low Dose | | Method of |
|---|---|---|---|
| Renal Toxin | (mg/kg) | High Dose (mg/kg) | Administration |
| indomethacin | 1 | 10 | oral gavage |
| diflunisal | 2 | 400 | oral gavage |
| colchicine | 0.15 | 1.5 | intraperitoneal |
| chloroform | 11.95 | 239 | oral gavage |
| diclofenac | 1 | 200 | intraperitoneal |
| menadione | 15 | 150 | intravenous |
| sodium chromate | 3 | 30 | intraperitoneal |
| sodium oxalate | 10 | 100 | intraperitoneal |
| thioacetamide | 30 | 300 | intraperitoneal |
| vancomycin | 50 | 500 | intravenous |

[0215] For the remaining compounds, the doses and methods of administration used were as follows:

| | Low Dose | | High Dose | | Method of |
|---|---|---|---|---|---|
| Renal Toxin | (mg/kg) | | (mg/kg) | | Administration |
| cephaloridine | 100 | | 800 | | intravenous |
| cisplatin | 1 | | 5 | | intravenous |
| PAN | 10 | | 150 | | intravenous |
| BEA | 10 | | 200 | | intraperitoneal |
| gentamicin | 2 | | 80 | | intramuscular |
| ifosfamide | 5 | | 100 | | intraperitoneal |
| cyclophosphamide | 20 | | 2000 | | intraperitoneal |
| carboplatin | 5 | | 50 | | intravenous |
| AY-25329 | 25 | | 250 | | oral gavage |
| indomethacin | 1 | | 10 | | oral gavage |
| acyclovir | 10 | | 100 | | intraperitoneal |
| citrinin | 1 | | 35 | | intraperitoneal |
| mercuric chloride | 0.1 | | 1 | | intravenous |
| diflunisal | 2 | | 400 | | oral gavage |
| cidofovir | 10 | | 100 | | intraperitoneal |
| pamidronate | 1 | | 60 | | intraperitoneal |
| lithium | 0.3 | (nmol/kg) | 3 | (nmol/ | intraperitoneal |
| | | | | kg) | |
| hydralazine | 2.5 | | 25 | | intraperitoneal |
| colchicine | 0.15 | | 1.5 | | intraperitoneal |
| sulfadiazine | 100 | | 1000 | | intravenous |
| adriamycin | 1.3 | | 12.8 | | intravenous |

Animals were sacrificed and samples collected at the time points previously described in the priority applications discussed above.

[0216] After administration, the dosed animals were observed and tissues were collected as described below:

Observation of Animals

[0217] 1. Clinical cage side observations—twice daily mortality and moribundity check. Skin and fur, eyes and mucous membrane, respiratory system, circulatory system, autonomic and central nervous system, somatomotor pattern, and behavior pattern were checked. Potential signs of toxicity, including tremors, convulsions, salivation, diarrhea, lethargy, coma or other atypical behavior or appearance, were recorded as they occurred and included a time of onset, degree, and duration.

[0218] 2. Physical Examinations—Prior to randomization, prior to initial treatment, and prior to sacrifice.

[0219] 3. Body Weights—Prior to randomization, prior to initial treatment, and prior to sacrifice.

Clinical Pathology

[0220] 1. Frequency—Prior to necropsy.

[0221] 2. Number of animals—All surviving animals.

[0222] 3. Bleeding Procedure—Blood was obtained by puncture of the orbital sinus while under 70% CO₂/30% O₂ anesthesia.

[0223] Collection of Blood Samples—Approximately 0.5 mL of blood was collected into EDTA tubes for evaluation of hematology parameters. Approximately 1 mL of blood was collected into serum separator tubes for clinical chemistry analysis. Approximately 200 uL of plasma was obtained and frozen at ˜80° C. for test compound/metabolite estimation. An additional ˜2 mL of blood was collected into a 15 mL conical polypropylene vial to which ˜3 mL of Trizol was immediately added. The contents were immediately mixed with a vortex and by repeated inversion. The tubes were frozen in liquid nitrogen and stored at ˜80° C.

Termination Procedures

Terminal Sacrifice

[0224] Approximately 3, 6, 24, 48, 72, 120, 144, 168, 336, and/or 360 hours after the initial dose, rats were weighed, physically examined, sacrificed by decapitation, and exsanguinated. The animals were necropsied within approximately five minutes of sacrifice. Separate sterile, disposable instruments were used for each animal, with the exception of bone cutters, which were used to open the skull cap. The bone cutters were dipped in disinfectant solution between animals.

[0225] Necropsies were conducted on each animal following procedures approved by board-certified pathologists.

[0226] Animals not surviving until terminal sacrifice were discarded without necropsy (following euthanasia by carbon dioxide asphyxiation, if moribund). The approximate time of death for moribund or found dead animals was recorded.

Postmortem Procedures

[0227] Fresh and sterile disposable instruments were used to collect tissues. Gloves were worn at all times when handling tissues or vials. All tissues were collected and frozen within approximately 5 minutes of the animal's death. The liver sections and kidneys were frozen within approximately 3-5 minutes of the animal's death. The time of euthanasia, an interim time point at freezing of liver sections and kidneys, and time at completion of necropsy were recorded. Tissues were stored at approximately −80° C. or preserved in 10% neutral buffered formalin.

Tissue Collection and Processing

[0228] Liver

[0229] 1. Right medial lobe—snap frozen in liquid nitrogen and stored at ˜−80° C.

[0230] 2. Left medial lobe—Preserved in 10% neutral-buffered formalin (NBF) and evaluated for gross and microscopic pathology.

[0231] 3. Left lateral lobe—snap frozen in liquid nitrogen and stored at ˜−80° C.

[0232] Heart-A sagittal cross-section containing portions of the two atria and of the two ventricles was preserved in 10% NBF. The remaining heart was frozen in liquid nitrogen and stored at ˜−80° C.

[0233] Kidneys (Both)

1. Left—Hemi-dissected; half was preserved in 10% NBF and the remaining half was frozen in liquid nitrogen and stored at ˜−80° C.

2. Right—Hemi-dissected; half was preserved in 10% NBF and the remaining half was frozen in liquid nitrogen and stored at ˜−80° C.

[0234] Testes (both)—A sagittal cross-section of each testis was preserved in 10% NBF. The remaining testes were frozen together in liquid nitrogen and stored at ˜−80° C.

[0235] Brain (whole)—A cross-section of the cerebral hemispheres and of the diencephalon was preserved in 10% NBF, and the rest of the brain was frozen in liquid nitrogen and stored at ˜−80° C.

[0236] Microarray sample preparation was conducted with minor modifications, following the protocols set forth in the Affymetrix GeneChip® Expression Technical Analysis Manual (Affymetrix, Inc. Santa Clara, Calif.). Frozen tissue was ground to a powder using a Spex Certiprep 6800 Freezer Mill. Total RNA was extracted with Trizol (Invitrogen, Carlsbad Calif.) utilizing the manufacturer's protocol. The total RNA yield for each sample was 200-500 μg per 300 mg tissue weight. mRNA was isolated using the Oligotex mRNA Midi kit (Qiagen) followed by ethanol precipitation. Double stranded cDNA was generated from mRNA using the SuperScript Choice system (Invitrogen, Carlsbad Calif.). First strand cDNA synthesis was primed with a T7-(dT24) oligonucleotide. The cDNA was phenol-chloroform extracted and ethanol precipitated to a final concentration of 1 μg/ml. From 2 μg of cDNA, cRNA was synthesized using Ambion's T7 MegaScript in vitro Transcription Kit.

[0237] To biotin label the cRNA, nucleotides Bio-11-CTP and Bio-16-UTP (Enzo Diagnostics) were added to the reaction. Following a 37° C. incubation for six hours, impurities were removed from the labeled cRNA following the RNeasy Mini kit protocol (Qiagen). cRNA was fragmented (fragmentation buffer consisting of 200 mM Tris-acetate, pH 8.1, 500 mM KOAc, 150 mM MgOAc) for thirty-five minutes at 94° C. Following the Affymetrix protocol, 55 μg of fragmented cRNA was hybridized on the Affymetrix rat array set for twenty-four hours at 60 rpm in a 45° C. hybridization oven. The chips were washed and stained with Streptavidin Phycoerythrin (SAPE) (Molecular Probes) in Affymetrix fluidics stations. To amplify staining, SAPE solution was added twice with an anti-streptavidin biotinylated antibody (Vector Laboratories) staining step in between. Hybridization to the probe arrays was detected by fluorometric scanning (Hewlett Packard Gene Array Scanner). Data was analyzed using Affymetrix GeneChip® version 2.0 and Expression Data Mining (EDMT) software (version 1.0), the GeneExpress® database, and S-Plus® statistical analysis software (Insightful Corp.).

[0238] Tables 1 and 2 disclose those genes that are differentially expressed upon exposure to the named toxins and their corresponding GenBank Accession and Sequence Identification numbers, the identities of the metabolic pathways in which the genes function, the gene names if known, and the unigene cluster titles. The model code represents the various toxicity state that each gene is able to discriminate as well as the individual toxin type associated with each gene. The codes are defined in Table 4. The GLGC ID is the internal Gene Logic identification number.

[0239] Table 3 discloses those genes that are the human homologues of those genes in Tables 1 and 2 that are differentially expressed upon exposure to the named toxins. The corresponding GenBank Accession and Sequence Identification numbers, the gene names if known, and the unigene cluster titles of the human homologues are listed.

[0240] Table 4 defines the models of Tables 5A-5N.

[0241] The models of Tables 5A-5M (individual toxin models, pathology models and general toxin models) disclose the summary statistics for each of the comparisons performed. Table 5A contains gene expression information from the chloroform toxicity model. Table 5B contains gene expression information from the diclofenac toxicity model. Table C contains gene expression information from the menadione toxicity model. contains gene expression information from the chloroform toxicity model. Table D contains gene expression information from the sodium chromate toxicity model. Table E contains gene expression information from the sodium oxalate toxicity model. Table F contains gene expression information from the thioacetamide toxicity model. Table G contains gene expression information from the vancomycin toxicity model. Table H contains gene expression information from the pathology model of damage to the S2 segment of the renal proximal tubule. Table I contains gene expression information from the pathology model of renal tubular toxicity. Table J contains gene expression information from the pathology model of glomerular injury. Table K contains gene expression information from the pathology model of tubular obstruction. Table L contains gene expression information from the NSAIDS (non-steroidal anti-inflammatory drugs) toxicity model. Lastly, Table M contains gene expression information from a general toxicity model.

[0242] Each of these tables contains a set of predictive genes and creates a model for predicting the renal toxicity of an unknown, i.e., untested compound. Each gene is identified by its Gene Logic identification number and can be cross-referenced to a gene name and representative SEQ ID NO. in Tables 1 and 2. For each comparison of gene expression levels between samples in the toxicity group (samples affected by exposure to a specific toxin) and samples in the non-toxicity group (samples not affected by exposure to that same specific toxin), the tox group mean (for toxicity group samples) is the mean signal intensity, as normalized for the various chip parameters that are being assayed. The non-tox group mean represents the mean signal intensity, as normalized for the various chip parameters that are being assayed, in samples from animals other than those treated with the high dose of the specific toxin. These animals were treated with a low dose of the specific toxin, or with vehicle alone, or with a different toxin. Samples in the toxicity groups were obtained from animals sacrificed at the time points previously described, while samples in the non-toxicity groups were obtained from animals sacrificed at all time points in the experiments. For individual genes, an increase in the tox mean compared to the non-tox mean indicates up-regulation upon exposure to a toxin. Conversely, a decrease in the tox mean compared to the non-tox mean indicates down-regulation.

[0243] The mean values are derived from Average Difference (AveDiff) values for a particular gene, averaged across the corresponding samples. Each individual Average Difference value is calculated by integrating the intensity information from multiple probe pairs that are tiled for a particular fragment. The normalization multiplies each expression intensity for a given experiment (chip) by a global scaling factor. The intent of this normalization is to make comparisons of individual genes between chips possible. The scaling factor is calculated as follows:

[0244] From all the unnormalized expression values in the experiment, delete the largest 2% and smallest 2% of the values. That is, if the experiment yields 10,000 expression values, order the values and delete the smallest 200 and the largest 200.

[0245] 2. Compute the trimmed mean, which is equal to the mean of the remaining values.

[0246] 3. Compute the scale factor SF=100/(trimmed mean).

[0247] The value of 100 used here is the standard target value used. Some AveDiff values may be negative due to the general noise involved in nucleic acid hybridization experiments. Although many conclusions can be made corresponding to a negative value on the GeneChip® platform, it is difficult to assess the meaning behind the negative value for individual fragments. Our observations show that, although negative values are observed at times within the predictive gene set, these values reflect a real biological phenomenon that is highly reproducible across all the samples from which the measurement was taken. For this reason, those genes that exhibit a negative value are included in the predictive set. It should be noted that other platforms of gene expression measurement may be able to resolve the negative numbers for the corresponding genes. The predictive ability of each of those genes does extend across platforms. Each mean value is accompanied by the standard deviation for the mean. The linear discriminant analysis score (discriminant score), as disclosed in the tables, measures the ability of each gene to predict whether or not a sample is toxic. The discriminant score is calculated by the following steps:

Calculation of a Discriminant Score

[0248] 1. Let Xᵢ represent the AveDiff values for a given gene across the non-tox samples, i=1 . . . n.

[0249] 2. Let Yᵢ represent the AveDiff values for a given gene across the tox samples, i=1 . . . t. The calculations proceed as follows:

[0250] 3. Calculate mean and standard deviation for Xᵢ's and Yᵢ's, and denote these by m_{X}, m_{Y}, s_{X}, s_{Y}.

[0251] 4. For all Xᵢ's and Yᵢ's, evaluate the function f(z)=((1/s_{Y})*exp(−0.5*((z−m_{Y})/s_{Y})²))/(((1/s_{Y})*exp(−0.5*((z−m_{Y})/sy)²))+((1/s_{X})*exp(−0.5*((z−m_{X})/s_{X})²))).

[0252] 5. The number of correct predictions, say P, is then the number of Yᵢ's such that f(Yᵢ)>0.5 plus the number of Xᵢ's such that f(Xᵢ)<0.5.

[0253] 6. The discriminant score is then P/(n+t).

[0254] Linear discriminant analysis uses both the individual measurements of each gene and the calculated measurements of all combinations of genes to classify samples. For each gene a weight is derived from the mean and standard deviation of the toxic and nontox groups. Every gene is multiplied by a weight and the sum of these values results in a collective discriminate score. This discriminant score is then compared against collective centroids of the tox and nontox groups. These centroids are the average of all tox and nontox samples respectively. Therefore, each gene contributes to the overall prediction. This contribution is dependent on weights that are large positive or negative numbers if the relative distances between the tox and nontox samples for that gene are large and small numbers if the relative distances are small. The discriminant score for each unknown sample and centroid values can be used to calculate a probability between zero and one as to the group in which the unknown sample belongs.

### Example 2

### Identification of Toxicity Markers Using RMA and PLS Algorithms

[0255] Dosing of animals with toxins and vehicle controls, sacrificing of animals, preparation and hybridization of RNA to DNA microarrays, and obtaining gene expression values were performed as described in Example 1 above. The following toxins and negative controls were used and administered according to the protocols in Table 6.

[0256] RMA/PLS models were built as follows. From DNA microarray data from one or more tox studies, a matrix of RMA fold-change expression values was generated. These values may be generated, for example, according to the method of Irizarry et al. (Nucl Acids Res 31(4):e15, 2003), which uses the following equation to produce a log scale linear additive model: T(PMᵢⱼ)=eᵢ+aⱼ+εᵢⱼ. T represents the transformation that corrects for background and normalizes and converts the PM (perfect match) intensities to a log scale. eᵢ represents the log2 scale expression values found on arrays i=1−I, aⱼ represents the log scale affinity effects for probes j=1−J, and εᵢⱼ represents error (to correct for the differences in variances when using probes that bind with different intensities). In RMA fold-change matrices, the rows represent individual fragments, and the columns are individual samples. A vehicle cohort median matrix was then calculated, in which the rows represent fragments and the columns represent vehicle cohorts, one cohort for each study/time-point combination. The values in this matrix are the median RMA expression values across the samples within those cohorts. Next, a matrix of normalized RMA expression values was generated, in which the rows represent individual fragments and the columns are individual samples. The normalized RMA values are the RMA values minus the value from the vehicle cohort median matrix corresponding to the time-matched vehicle cohort. PLS modeling was then applied to the normalized RMA matrix (a subset by taking certain fragments as described below), using a−1=non-tox, +1=tox supervised score vector.

[0257] To select fragments, a vehicle cohort mean matrix was generated, in which the rows represent fragments and the columns represent vehicle cohorts, one cohort for each study/time-point combination. The values in this matrix are the mean RMA expression values across the samples within those cohorts. A treated cohort mean matrix was then generated, in which the rows represent fragments and the columns represent treated (non-vehicle) cohorts, one cohort for each study/time-point/compound/dose combination. The values in this matrix are the mean RMA expression values across the samples within those cohorts. Next, a treated cohort fold-change matrix was generated, in which the rows represent fragments and the columns represent treated cohorts, one cohort for each study/time-point/compound/dose combination. The values in this matrix are the values in the treated cohort mean matrix minus the values in the vehicle cohort mean matrix corresponding to appropriate time-matched vehicle cohorts. Subsequently, a treated cohort p-value matrix was generated, in which the rows represent fragments and the columns represent treated cohorts, one cohort for each study/time-point/compound/dose combination. The values in this matrix are p-values based on two-sample t-tests comparing the treated cohort mean values to the vehicle cohort mean values corresponding to appropriate time-matched vehicle cohorts. This matrix was converted to a binary coding based on the p-values being less than 0.05 (coded as 1) or greater than 0.05 (coded as 0).

[0258] The row sums of the binary treated cohort p-value matrix were computed, where that row sum represents a “regulation score” for each fragment, representing the total number of treated cohorts where the fragment showed differential regulation (up- or down-regulation) compared to its time-matched vehicle cohort. PLS modeling and cross-validation were then performed based on taking the top N fragments according to the regulation score, varying N and recording the model success rate for each N. N was chosen to be the point at which the cross-validated error rate was minimized. In the PLS model, each of those N fragments receives a PLS weight (PLS score) corresponding to the fragment's utility, or predictive ability, in the model. The data in Table 5N are taken from a kidney toxicity prediction model in which 2179 samples were assayed. This predictive model is based on expression levels of 782 genes. Thus, using a set of genes and a supervised grouping of samples, PLS can identify optimal prediction weights for those genes.

[0259] To determine whether or not a sample from an animal treated with a test compound shows a toxic response, RNA is prepared from a treatment sample and hybridized to a DNA microarray, as described in Example 1 above. From the gene expression information, a prediction score is calculated for that sample and compared to a reference score from a kidney toxicity reference database according to the following equation. The sample prediction score=ΣwᵢR^{FC}^{ᵢ}. “i” is the index number for each gene in a gene expression profile to be evaluated. “wᵢ” is the PLS weight (or PLS score, see Table 5N) for each gene. “R^{FC}^{ᵢ}” is the RMA fold-change value for the i^{th} gene, as determined from a normalized RMA matrix of gene expression data from the sample (described above). The PLS weight multiplied by the RMA fold-change value gives a prediction score for each gene, and the prediction scores for all the individual genes are added to give a prediction score for the sample. In a kidney toxicity database of the instant invention, a cut-off prediction score is about 0.318. If the sample score is about 0.318 or above, it can be predicted that the sample shows a toxic response after exposure to the test compound. If the sample score is below 0.318, it can be predicted that the sample does not show a toxic response.

[0260] The model can be trained by setting a score of −1 for each gene that cannot predict a toxic response and by setting a score of +1 for each gene that can predict a toxic response. Cross-validation of RMA/PLS models was performed by the compound-drop method and by the 2/3:1/3 method. In the compound-drop method, sample data from animals treated with one particular test compound were removed from a model, and the ability of this model to predict toxicity was compared to that of a model containing a full data set. In the 2/3:1/3 method, gene expression information from a random third of the genes in the model was removed, and the ability of this subset model to predict toxicity was compared to that of a model containing a full data set.

[0261] Compared to LDA models for predicting kidney toxicity, RMA/PLS models showed about a 10% increase in the true positive sample rates (89% vs. 79%) and about a 1.5% increase in the false positive sample rates (2.5% vs. 1%).

### Example 3

### General Toxicity Modeling

[0262] Samples were selected for grouping into tox-responding and non-tox-responding groups by examining each study individually with Principal Components Analysis (PCA) to determine which treatments had an observable response. Only groups where confidence of their tox-responding and non-tox-responding status was established were included in building a general tox model (Table 5M).

[0263] Linear discriminant models were generated to describe toxic and non-toxic samples. The top discriminant genes and/or EST's were used to determine toxicity by calculating each gene's contribution with homo and heteroscedastic treatment of variance and inclusion or exclusion of mutual information between genes. Prediction of samples within the database exceeded 80% true positives with a false positive rate of less than 5%. It was determined that combinations of genes and/or EST's generally provided a better predictive ability than individual genes and that the more genes and/or EST used the better predictive ability. Although the preferred embodiment includes fifty or more genes, many pairings or greater combinations of genes and/or EST can work better than individual genes. All combinations of two or more genes from the selected list (Table 5M) could be used to predict toxicity. These combinations could be selected by pairing in an agglomerate, divisive, or random approach. Further, as yet undetermined genes and/or EST's could be combined with individual or combination of genes and/or EST's described here to increase predictive ability. However, the genes and/or EST's described here would contribute most of the predictive ability of any such undetermined combinations.

[0264] Other variations on the above method can provide adequate predictive ability. These include selective inclusion of components via agglomerate, divisive, or random approaches or extraction of loading and combining them in agglomerate, divisive, or random approaches. Also the use of composite variables in logistic regression to determine classification of samples can also be accomplished with linear discriminate analysis, neural or Bayesian networks, or other forms of regression and classification based on categorical or continual dependent and independent variables.

### Example 4

### Modeling Methods

[0265] The above modeling methods provide broad approaches of combining the expression of genes to predict sample toxicity. One could also provide no weight in a simple voting method or determine weights in a supervised or unsupervised method using agglomerate, divisive, or random approaches. All or selected combinations of genes may be combined in ordered, agglomerate, or divisive, supervised or unsupervised clustering algorithms with unknown samples for classification. Any form of correlation matrix may also be used to classify unknown samples. The spread of the group distribution and discriminate score alone provide enough information to enable a skilled person to generate all of the above types of models with accuracy that can exceed discriminate ability of individual genes. Some examples of methods that could be used individually or in combination after transformation of data types include but are not limited to: Discriminant Analysis, Multiple Discriminant Analysis, logistic regression, multiple regression analysis, linear regression analysis, conjoint analysis, canonical correlation, hierarchical cluster analysis, k-means cluster analysis, self-organizing maps, multidimensional scaling, structural equation modeling, support vector machine determined boundaries, factor analysis, neural networks, bayesian classifications, and resampling methods. Further, in any model, a compound may be classified as a negative control because it appears to produce reduced toxicity, although the compound may be added to the model as a toxin to increase the sensitivity for predicting toxicity.

### Example 5

### Grouping of Individual Compound and Pathology Classes

[0266] Samples were grouped into individual pathology classes based on known toxicological responses and observed clinical chemical and pathology measurements or into early and late phases of observable toxicity within a compound (Tables 5A-5L). The top 10, 25, 50, 100 genes based on individual discriminate scores were used in a model to ensure that combination of genes provided a better prediction than individual genes. As described above, all combinations of two or more genes from this list could potentially provide better prediction than individual genes when selected in any order or by ordered, agglomerate, divisive, or random approaches. In addition, combining these genes with other genes could provide better predictive ability, but most of this predictive ability would come from the genes listed herein.

[0267] Samples may be considered toxic if they score positive in any pathological or individual compound class represented here or in any modeling method mentioned under general toxicology models based on combination of individual time and dose grouping of individual toxic compounds obtainable from the data. The pathological groupings and early and late phase models are preferred examples of all obtainable combinations of sample time and dose points. Most logical groupings with one or more genes and one or more sample dose and time points should produce better predictions of general toxicity, pathological specific toxicity, or similarity to known toxicant than individual genes.

[0268] Although the present invention has been described in detail with reference to examples above, it is understood that various modifications can be made without departing from the spirit of the invention. Accordingly, the invention is limited only by the following claims. All cited patents, patent applications and publications referred to in this application are herein incorporated by reference in their entirety.

TABLE 1

| GLGC | | GenBank Acc | Model | | |
|---|---|---|---|---|---|
| Identifier | Seq ID | or RefSeq ID | Code | Known Gene Name | UniGene Cluster Title |
| 6917 | 1 | AA012709 | B | | Rattus norvegicus transcribed sequence with strong similarity to protein |
| | | | | | ref: NP_112456.1 (M. musculus) splicing factor 3b, subunit 1, 155 kDa [Mus |
| | | | | | musculus] |
| 25098 | 2 | AA108277 | N, C, H | | |
| 6049 | 3 | AA685178 | F | | Rattus norvegicus transcribed sequence with strong similarity to protein |
| | | | | | pir: T30827 (M. musculus) T30827 nascent polypeptide-associated complex |
| | | | | | alpha chain, non-muscle splice form - mouse |
| 25106 | 4 | AA686579 | B | | Rattus norvegicus transcribed sequence with strong similarity to protein |
| | | | | | sp: Q93068 (M. musculus) SM33_HUMAN Ubiquitin-like protein SMT3C |
| | | | | | precursor (Ubiquitin-homology domain protein PIC1) (Ubiquitin-like protein |
| | | | | | UBL1) (Ubiquitin-related protein SUMO-1) (GAP modifying protein 1) (GMP1) |
| | | | | | (Sentrin) |
| 12349 | 5 | AA799276 | M | ATPase, Ca++ transporting, cardiac muscle, slow twitch 2 | ATPase, Ca++ transporting, cardiac muscle, slow twitch 2 |
| 19222 | 6 | AA799279 | J | | Rattus norvegicus transcribed sequence with strong similarity to protein |
| | | | | | ref: NP_062732.1 (M. musculus) mitochondrial carrier homolog 2 [Mus |
| | | | | | musculus] |
| 18272 | 7 | AA799294 | I | | Rattus norvegicus transcribed sequence with moderate similarity to protein |
| | | | | | ref: NP_055993.1 (H. sapiens) KIAA0717 protein [Homo sapiens] |
| 18396 | 8 | AA799330 | M, N, H, I | | Rattus norvegicus transcribed sequence with strong similarity to protein |
| | | | | | ref: NP_057030.1 (H. sapiens) CGI-17 protein; pelota (Drosophila) homolog |
| | | | | | [Homo sapiens] |
| 16039 | 9 | AA799452 | H | transaldolase 1 | transaldolase 1 |
| 20961 | 10 | AA799465 | L | | Rattus norvegicus transcribed sequence |
| 16150 | 11 | AA799489 | G | acyl-coA oxidase | acyl-coA oxidase |
| 18291 | 12 | AA799497 | N | | Rattus norvegicus transcribed sequences |
| 15302 | 13 | AA799518 | M | | Rattus norvegicus transcribed sequence with moderate similarity to protein |
| | | | | | ref: NP_075223.1 (R. norvegicus) DnaJ-like protein [Rattus norvegicus] |
| 15303 | 13 | AA799518 | F | | Rattus norvegicus transcribed sequence with moderate similarity to protein |
| | | | | | ref: NP_075223.1 (R. norvegicus) DnaJ-like protein [Rattus norvegicus] |
| 23063 | 14 | AA799534 | M, N, K | | Rattus norvegicus transcribed sequences |
| 22669 | 15 | AA799567 | D | | Rattus norvegicus transcribed sequences |
| 18361 | 16 | AA799591 | M, N | | Rattus norvegicus transcribed sequence with strong similarity to protein |
| | | | | | prf: 1202265A (R. norvegicus) 1202265A tubulin T beta15 [Rattus norvegicus] |
| 15844 | 17 | AA799600 | D | | Rattus norvegicus transcribed sequence with strong similarity to protein |
| | | | | | ref: NP_115647.1 (H. sapiens) hypothetical protein DKFZp586I021 [Homo |
| | | | | | sapiens] |
| 22910 | 18 | AA799654 | K | | Rattus norvegicus transcribed sequence with strong similarity to protein |
| | | | | | ref: NP_038936.1 (M. musculus) f-box and WD-40 domain protein 5; F-box |
| | | | | | protein Fbw5 [Mus musculus] |
| 14309 | 19 | AA799676 | M, N | | Rattus norvegicus transcribed sequences |
| 17494 | 20 | AA799751 | M, K | | Rattus norvegicus transcribed sequence with weak similarity to protein |
| | | | | | ref: NP_476544.1 (R. norvegicus) brain-specific angiogenesis inhibitor 1- |
| | | | | | associated protein 2 [Rattus norvegicus] |
| 18360 | 21 | AA799771 | M, I | | Rattus norvegicus transcribed sequences |
| 21007 | 22 | AA799861 | N | | Rattus norvegicus transcribed sequence with strong similarity to protein |
| | | | | | sp: P70434 (M. musculus) IRF7_MOUSE Interferon regulatory factor 7 (IRF-7) |
| 23202 | 23 | AA799971 | M | | Rattus norvegicus transcribed sequence with moderate similarity to protein |
| | | | | | ref: NP_060761.1 (H. sapiens) hypothetical protein FLJ10986 [Homo sapiens] |
| 23203 | 23 | AA799971 | M, N | | Rattus norvegicus transcribed sequence with moderate similarity to protein |
| | | | | | ref: NP_060761.1 (H. sapiens) hypothetical protein FLJ10986 [Homo sapiens] |
| 21029 | 24 | AA799981 | C | protein kinase C-eta | protein kinase C-eta |
| 2098 | 25 | AA799995 | C | actin, beta | actin, beta |
| 4412 | 26 | AA800005 | N | CD151 antigen | CD151 antigen |
| 21035 | 27 | AA800025 | N | | Rattus norvegicus transcribed sequence with strong similarity to protein |
| | | | | | ref: NP_542787.1 (H. sapiens) chromosome 20 open reading frame 163 |
| | | | | | [Homo sapiens] |
| 21072 | 28 | AA800211 | K | pyridoxine 5-phosphate oxidase | pyridoxine 5-phosphate oxidase |
| 21086 | 29 | AA800305 | D | | Rattus norvegicus transcribed sequence with strong similarity to protein |
| | | | | | ref: NP_073183.1 (R. norvegicus) small GTP-binding protein rab5 [Rattus |
| | | | | | norvegicus] |
| 17325 | 30 | AA800587 | M, G, K | | Rattus norvegicus transcribed sequence with weak similarity to protein |
| | | | | | sp: P04041 (R. norvegicus) GSHC_RAT Glutathione peroxidase (GSHPX-1) |
| | | | | | (Cellular glutathione peroxidase) |
| 13930 | 31 | AA800613 | M | zinc finger protein 36 | zinc finger protein 36 |
| 18462 | 32 | AA800708 | N | | Rattus norvegicus transcribed sequences |
| 18564 | 33 | AA800745 | M | aminolevulinate, delta-, dehydratase | aminolevulinate, delta-, dehydratase |
| 6595 | 34 | AA800753 | C | | Rattus norvegicus transcribed sequences |
| 21388 | 35 | AA800771 | C | | Rattus norvegicus transcribed sequences |
| 12797 | 36 | AA800790 | D | | Rattus norvegicus transcribed sequences |
| 22386 | 37 | AA800844 | N, F | | Rattus norvegicus transcribed sequence with moderate similarity to protein |
| | | | | | sp: P16636 (R. norvegicus) LYOX_RAT Protein-lysine 6-oxidase precursor |
| | | | | | (Lysyl oxidase) |
| 15022 | 38 | AA801029 | N | nuclear receptor subfamily 2, group F, member 6 | nuclear receptor subfamily 2, group F, member 6 |
| 14600 | 39 | AA801076 | K | | Rattus norvegicus transcribed sequences |
| 23115 | 40 | AA801165 | A, F | | Rattus norvegicus transcribed sequence with strong similarity to protein |
| | | | | | sp: P02262 (R. norvegicus) H2A1_RAT Histone H2A.1 |
| 15027 | 41 | AA801212 | D | | Rattus norvegicus transcribed sequences |
| 7543 | 42 | AA801395 | M | | Rattus norvegicus transcribed sequence with moderate similarity to protein |
| | | | | | ref: NP_080242.1 (M. musculus) RIKEN cDNA 2310039H08 [Mus musculus] |
| 20753 | 43 | AA801441 | M, N, C, I | platelet-activating factor acetylhydrolase beta subunit | platelet-activating factor acetylhydrolase beta subunit (PAF-AH beta) |
| | | | | (PAF-AH beta) | |
| 5930 | 44 | AA817688 | B | | Rattus norvegicus transcribed sequences |
| 24237 | 45 | AA817726 | M | | Rattus norvegicus transcribed sequences |
| 1650 | 46 | AA817825 | A | Peptidylglycine alpha-amidating monooxygenase | Peptidylglycine alpha-amidating monooxygenase |
| 2109 | 47 | AA817887 | N, G | profilin | profilin |
| 16907 | 48 | AA817977 | C | | Rattus norvegicus transcribed sequence with weak similarity to protein |
| | | | | | ref: NP_079770.1 (M. musculus) similar to human ATP6C source AF363578.1 |
| | | | | | [Mus musculus] |
| 6675 | 49 | AA817994 | C | | Rattus norvegicus transcribed sequence with weak similarity to protein |
| | | | | | ref: NP_062213.1 (R. norvegicus) regulator of G-protein signaling 3 [Rattus |
| | | | | | norvegicus] |
| 3016 | 50 | AA818069 | H | polyubiquitin | polyubiquitin |
| 16756 | 51 | AA818089 | M, A, I | | Rattus norvegicus transcribed sequence with strong similarity to protein |
| | | | | | pir: A55314 (H. sapiens) A55314 glycine - tRNA ligase (EC 6.1.1.14) precursor |
| | | | | | [validated] - human |
| 10983 | 52 | AA818132 | G | | Rattus norvegicus transcribed sequences |
| 6014 | 53 | AA818153 | B, H | | Rattus norvegicus transcribed sequences |
| 6022 | 54 | AA818197 | E | | Rattus norvegicus protein tyrosine phosphatase non-receptor type 13 |
| | | | | | (Ptpn13), 3′UTR |
| 11421 | 55 | AA818199 | E | src associated in mitosis, 68 kDa | src associated in mitosis, 68 kDa |
| 17771 | 56 | AA818224 | M | | Rat mRNA for beta-tubulin T beta15 |
| 5923 | 57 | AA818355 | M, I | | Rattus norvegicus transcribed sequences |
| 11610 | 58 | AA818725 | J | | Rattus norvegicus transcribed sequence with moderate similarity to protein |
| | | | | | ref: NP_149107.1 (H. sapiens) hypothetical protein MGC16714 [Homo |
| | | | | | sapiens] |
| 4291 | 59 | AA818741 | M, I, J | | Rattus norvegicus transcribed sequences |
| 4330 | 60 | AA818747 | M, B | chemokine (C—X—C motif) ligand 12 | chemokine (C—X—C motif) ligand 12 |
| 19723 | 61 | AA818761 | M | | Rattus norvegicus transcribed sequence with strong similarity to protein |
| | | | | | pir: A36370 (M. musculus) A36370 immediate-early protein pip92 - mouse |
| 4952 | 62 | AA818907 | M, C | | Rattus norvegicus transcribed sequences |
| 10985 | 63 | AA818998 | M, I | | Rattus norvegicus transcribed sequences |
| 16958 | 64 | AA819021 | A | | |
| 5863 | 65 | AA819111 | M, H, I | | Rattus norvegicus transcribed sequences |
| 12684 | 66 | AA819179 | F | | Rattus norvegicus transcribed sequences |
| 9125 | 67 | AA819338 | N | signal sequence receptor 4 | signal sequence receptor 4 |
| 17824 | 68 | AA819362 | A | | Rattus norvegicus Ba1-643 mRNA, complete cds |
| 6336 | 69 | AA819403 | M | | Rattus norvegicus transcribed sequences |
| 6278 | 70 | AA819471 | B | | Rattus norvegicus transcribed sequence with strong similarity to protein |
| | | | | | ref: NP_079747.1 (M. musculus) RIKEN cDNA 1810030N24 [Mus musculus] |
| 19433 | 71 | AA819776 | H | | |
| 22820 | 72 | AA848315 | M | | Rattus norvegicus transcribed sequence with strong similarity to protein |
| | | | | | pir: JT0565 (M. musculus) JT0565 IMP dehydrogenase (EC 1.1.1.205) - mouse |
| 6614 | 73 | AA848389 | G | | Rattus norvegicus transcribed sequence with weak similarity to protein |
| | | | | | ref: NP_496764.1 (C. elegans) Iron-containing alcohol dehydrogenases |
| | | | | | [Caenorhabditis elegans] |
| 21125 | 74 | AA848437 | M, L | | Rattus norvegicus transcribed sequences |
| 23505 | 75 | AA848496 | J | | Rattus norvegicus transcribed sequence with weak similarity to protein |
| | | | | | sp: Q9WUK2 (M. musculus) IF4H_MOUSE Eukaryotic translation initiation |
| | | | | | factor 4H (elF-4H) (Williams-Beuren syndrome chromosome region 1 protein |
| | | | | | homolog) |
| 11653 | 76 | AA848689 | A, F | | Rattus norvegicus transcribed sequence with weak similarity to protein |
| | | | | | sp: P43165 (R. norvegicus) CAH5_RAT Carbonic anhydrase VA, mitochondrial |
| | | | | | precursor (Carbonate dehydratase VA) (CA-VA) |
| 21140 | 77 | AA848738 | J | | Rattus norvegicus transcribed sequence with weak similarity to protein |
| | | | | | ref: NP_035246.1 (M. musculus) phospholipase D3 [Mus musculus] |
| 21165 | 78 | AA848941 | K | actinin, alpha 1 | actinin, alpha 1 |
| 21166 | 78 | AA848941 | K | actinin, alpha 1 | actinin, alpha 1 |
| 2924 | 79 | AA848948 | H | | Rattus norvegicus transcribed sequence with weak similarity to protein |
| | | | | | ref: NP_510258.1 (C. elegans) F18H3.1.p [Caenorhabditis elegans] |
| 22631 | 80 | AA849030 | K | | Rattus norvegicus transcribed sequence with strong similarity to protein |
| | | | | | ref: NP_062310.1 (M. musculus) hypothetical protein 0610038L10Rik [Mus |
| | | | | | musculus] |
| 8888 | 81 | AA849036 | N, B | guanylate cyclase 1, soluble, alpha 3 | guanylate cyclase 1, soluble, alpha 3 |
| 19412 | 82 | AA849222 | D | | Rattus norvegicus transcribed sequence with weak similarity to protein |
| | | | | | ref: NP_291082.1 (M. musculus) arkadia [Mus musculus] |
| 17339 | 83 | AA849497 | M | | Rattus norvegicus transcribed sequence with strong similarity to protein |
| | | | | | ref: NP_062785.1 (M. musculus) acetyl-Coenzyme A synthetase 1 (AMP |
| | | | | | forming); acetyl-Coenzyme A synthetase 2 (AMP forming); acetyl-CoA |
| | | | | | synthetase [Mus musculus] |
| 6635 | 84 | AA849786 | M | | Rattus norvegicus transcribed sequence with weak similarity to protein |
| | | | | | sp: Q63117 (R. norvegicus) CLK3_RAT Protein kinase CLK3 (CDC-like kinase |
| | | | | | 3) |
| 18447 | 85 | AA849939 | F | | Rattus norvegicus transcribed sequence with strong similarity to protein |
| | | | | | pdb: 1BGM (E. coli) O Chain O, Beta-Galactosidase (Chains I-P) |
| 12129 | 86 | AA849966 | A, D | | Rattus norvegicus transcribed sequence with moderate similarity to protein |
| | | | | | ref: NP_291042.1 (M. musculus) Mpv17 transgene, kidney disease mutant-like |
| | | | | | [Mus musculus] |
| 21341 | 87 | AA850195 | I | | Rattus norvegicus transcribed sequences |
| 14410 | 88 | AA850292 | F | | Rattus norvegicus transcribed sequences |
| 13615 | 89 | AA850364 | L | | Rattus norvegicus transcribed sequences |
| 21766 | 90 | AA850916 | J | | Rattus norvegicus transcribed sequences |
| 1867 | 91 | AA850940 | N | ribosomal protein L4 | ribosomal protein L4 |
| 3925 | 92 | AA851017 | A, E | | Rattus norvegicus transcribed sequence with moderate similarity to protein |
| | | | | | ref: NP_038854.1 (M. musculus) molybdenum cofactor synthesis 2 [Mus |
| | | | | | musculus] |
| 18751 | 93 | AA851169 | G | protease (prosome, macropain) 28 subunit, beta | protease (prosome, macropain) 28 subunit, beta |
| 17823 | 94 | AA851214 | D | | Rattus norvegicus Ba1-643 mRNA, complete cds |
| 21462 | 95 | AA851261 | M, J | | Rattus norvegicus transcribed sequence with moderate similarity to protein |
| | | | | | ref: NP_054781.1 (H. sapiens) ART-4 protein [Homo sapiens] |
| 13349 | 96 | AA851417 | M, H, I | | Rattus norvegicus transcribed sequences |
| 1685 | 97 | AA851497 | J | hemoglobin, alpha 1 | hemoglobin, alpha 1 |
| 21509 | 98 | AA851618 | G | epithelial membrane protein 3 | epithelial membrane protein 3 |
| 23307 | 99 | AA851749 | D | splicing factor, arginine/serine-rich (transformer 2 | splicing factor, arginine/serine-rich (transformer 2 Drosophila homolog) 10 |
| | | | | Drosophila homolog) 10 | |
| 18001 | 100 | AA858573 | M | spp-24 precursor | spp-24 precursor |
| 24377 | 101 | AA858590 | H | | Rattus norvegicus transcribed sequences |
| 17411 | 102 | AA858621 | N | CaM-kinase II inhibitor alpha | CaM-kinase II inhibitor alpha |
| 1801 | 103 | AA858636 | E | | Rattus norvegicus transcribed sequence with strong similarity to protein |
| | | | | | ref: NP_032594.1 (M. musculus) mini chromosome maintenance deficient 7 (S. cerevisiae) |
| | | | | | [Mus musculus] |
| 12700 | 104 | AA858673 | N | pancreatic secretory trypsin inhibitor type II (PSTI-II) | pancreatic secretory trypsin inhibitor type II (PSTI-II) |
| 18350 | 105 | AA858674 | C | | Rattus norvegicus transcribed sequences |
| 11615 | 106 | AA858816 | D | | Rattus norvegicus transcribed sequence with weak similarity to protein |
| | | | | | ref: NP_497482.1 (C. elegans) F53A3.7.p [Caenorhabditis elegans] |
| 7279 | 107 | AA858892 | M | | Rattus norvegicus transcribed sequences |
| 5867 | 108 | AA858953 | M | | Rattus norvegicus transcribed sequence with weak similarity to protein |
| | | | | | sp: P15178 (R. norvegicus) SYD_RAT ASPARTYL-TRNA SYNTHETASE |
| | | | | | (ASPARTATE-TRNA LIGASE) (ASPRS) |
| 6431 | 109 | AA859085 | L | | Rattus norvegicus transcribed sequences |
| 17361 | 110 | AA859114 | M, A, G | | |
| 21025 | 111 | AA859241 | M, A, C | synaptojanin 2 binding protein | synaptojanin 2 binding protein |
| 14124 | 112 | AA859305 | N | tropomyosin isoform 6 | tropomyosin isoform 6 |
| 16314 | 113 | AA859348 | M, I | | Rattus norvegicus transcribed sequences |
| 4178 | 114 | AA859536 | M, N, A | | Rattus norvegicus transcribed sequence with strong similarity to protein |
| | | | | | sp: P07153 (R. norvegicus) RIB1_RAT Dolichyl-diphosphooligosaccharide- |
| | | | | | protein glycosyltransferase 67 kDa subunit precursor (Ribophorin I) (RPN-I) |
| 15150 | 115 | AA859562 | N | | |
| 14353 | 116 | AA859585 | D | | Rattus norvegicus transcribed sequences |
| 11852 | 117 | AA859593 | N | | Rattus norvegicus transcribed sequence with moderate similarity to protein |
| | | | | | pdb: 1LBG (E. coli) B Chain B, Lactose Operon Repressor Bound To 21-Base |
| | | | | | Pair Symmetric Operator Dna, Alpha Carbons Only |
| 4809 | 118 | AA859616 | N | | Rattus norvegicus transcribed sequence with weak similarity to protein |
| | | | | | ref: NP_502422.1 (C. elegans) FYVE zinc finger [Caenorhabditis elegans] |
| 19067 | 119 | AA859663 | M, N, B | | Rattus norvegicus transcribed sequence with weak similarity to protein |
| | | | | | ref: NP_080153.1 (M. musculus) RIKEN cDNA 2310067G05 [Mus musculus] |
| 20582 | 120 | AA859688 | N, A, E, F, K | | Rattus norvegicus transcribed sequence with weak similarity to protein |
| | | | | | pdb: 1DUB (R. norvegicus) F Chain F, 2-Enoyl-Coa Hydratase, Data Collected |
| | | | | | At 100 K, Ph 6.5 |
| 14138 | 121 | AA859700 | M | | Rattus norvegicus transcribed sequence with moderate similarity to protein |
| | | | | | sp: P51175 (M. musculus) PPOX_MOUSE PROTOPORPHYRINOGEN |
| | | | | | OXIDASE (PPO) |
| 22374 | 122 | AA859804 | N | | Rattus norvegicus transcribed sequence with weak similarity to protein |
| | | | | | sp: P20415 (R. norvegicus) IF4E_MOUSE EUKARYOTIC TRANSLATION |
| | | | | | INITIATION FACTOR 4E (EIF-4E) (EIF4E) (MRNA CAP-BINDING PROTEIN) |
| | | | | | (EIF-4F 25 KDA SUBUNIT) |
| 11079 | 123 | AA859829 | E | | Rattus norvegicus transcribed sequence with strong similarity to protein |
| | | | | | ref: NP_067475.1 (M. musculus) erythroblast macrophage protein [Mus |
| | | | | | musculus] |
| 11481 | 124 | AA859832 | B | | Rattus norvegicus transcribed sequences |
| 22562 | 125 | AA859835 | F | | Rattus norvegicus transcribed sequences |
| 14184 | 126 | AA859837 | M | guanine deaminase | guanine deaminase |
| 14185 | 126 | AA859837 | M | guanine deaminase | guanine deaminase |
| 22927 | 127 | AA859920 | N, E | nucleosome assembly protein 1-like 1 | nucleosome assembly protein 1-like 1 |
| 23000 | 128 | AA859933 | F | | Rattus norvegicus transcribed sequences |
| 23166 | 129 | AA859954 | M, C, L | vacuole Membrane Protein 1 | vacuole Membrane Protein 1 |
| 18468 | 130 | AA859966 | J | | |
| 19377 | 131 | AA859971 | A, E | | Rattus norvegicus transcribed sequence with moderate similarity to protein |
| | | | | | ref: NP_079603.1 (M. musculus) RIKEN cDNA 0610010112 [Mus musculus] |
| 4222 | 132 | AA860024 | N | | Rattus norvegicus transcribed sequence with strong similarity to protein |
| | | | | | sp: Q9D8N0 (M. musculus) EF1G_MOUSE Elongation factor 1-gamma (EF-1- |
| | | | | | gamma) (eEF-1B gamma) |
| 13974 | 133 | AA860030 | M, F | tubulin, beta 5 | tubulin beta 5 |
| 7090 | 134 | AA860039 | N | | Rattus norvegicus transcribed sequence |
| 19144 | 135 | AA860049 | A | | Rattus norvegicus transcribed sequence with strong similarity to protein |
| | | | | | pdb: 1BGM (E. coli) O Chain O, Beta-Galactosidase (Chains I-P) |
| 4462 | 136 | AA866264 | M, A, C, I | | Rattus norvegicus transcribed sequence with weak similarity to protein |
| | | | | | sp: P51652 (R. norvegicus) PE2R_RAT 20-alpha-hydroxysteroid |
| | | | | | dehydrogenase (20-alpha-HSD) (HSD1) |
| 15927 | 137 | AA866321 | N | | Rattus norvegicus transcribed sequences |
| 11865 | 138 | AA866383 | N | | Rattus norvegicus transcribed sequences |
| 9391 | 139 | AA866477 | J | | Rattus norvegicus cytochrome c oxidase subunit VIIb mRNA, complete cds |
| 19402 | 140 | AA874848 | N | Thymus cell surface antigen | Thymus cell surface antigen |
| 18741 | 141 | AA874859 | M | | |
| 16070 | 142 | AA874873 | D | | Rattus norvegicus transcribed sequences |
| 16082 | 143 | AA874887 | E | | Rattus norvegicus transcribed sequence with weak similarity to protein |
| | | | | | ref: NP_113871.1 (R. norvegicus) segregation of mitotic chromosomes b; SMC |
| | | | | | (segregation of mitotic chromosomes 1)-like 1 (yeast) [Rattus norvegicus] |
| 16091 | 144 | AA874897 | J | | Rattus norvegicus transcribed sequences |
| 22781 | 145 | AA874926 | F | | Rattus norvegicus focal adhesion kinase (FAK) mRNA, alternative 5′UTR |
| 16139 | 146 | AA874927 | N | | Rattus norvegicus transcribed sequences |
| 16312 | 147 | AA875032 | M, I, L | | Rattus norvegicus transcribed sequences |
| 6451 | 148 | AA875033 | N | fibulin 5 | fibulin 5 |
| 16419 | 149 | AA875102 | N | | Rattus norvegicus transcribed sequence with strong similarity to protein |
| | | | | | sp: P08578 (M. musculus) RUXE_HUMAN Small nuclear ribonucleoprotein E |
| | | | | | (snRNP-E) (Sm protein E) (Sm-E) (SmE) |
| 15339 | 150 | AA875171 | D | | Rattus norvegicus transcribed sequence with weak similarity to protein |
| | | | | | ref: NP_032951.1 (M. musculus) protein kinase C substrate 80K-H [Mus |
| | | | | | musculus] |
| 18084 | 151 | AA875186 | N | | |
| 15371 | 152 | AA875205 | N | | Rattus norvegicus transcribed sequence with strong similarity to protein |
| | | | | | sp: P55884 (H. sapiens) IF39_HUMAN Eukaryotic translation initiation factor 3 |
| | | | | | subunit 9 (eIF-3 eta) (eIF3 p116) (elF3 p110) |
| 15376 | 153 | AA875206 | N | ubiquilin 1 | ubiquilin 1 |
| 15887 | 154 | AA875225 | N | GTP-binding protein (G-alpha-i2) | GTP-binding protein (G-alpha-i2) |
| 15888 | 154 | AA875225 | N | GTP-binding protein (G-alpha-i2) | GTP-binding protein (G-alpha-i2) |
| 15401 | 155 | AA875257 | N | | Rattus norvegicus transcribed sequences |
| 15421 | 156 | AA875286 | C, L | | Rattus norvegicus transcribed sequence with strong similarity to protein |
| | | | | | ref: NP_059128.1 (H. sapiens) prostate tumor over expressed gene 1 [Homo |
| | | | | | sapiens] |
| 15446 | 157 | AA875327 | L | | Rattus norvegicus transcribed sequence with weak similarity to protein |
| | | | | | ref: NP_072143.1 (R. norvegicus) nucleolin-related protein NRP (NRP) [Rattus |
| | | | | | norvegicus] |
| 18902 | 158 | AA875390 | N | thioredoxin-like (32 kD) | thioredoxin-like (32 kD) |
| 15505 | 159 | AA875414 | N | | Rattus norvegicus transcribed sequence with weak similarity to protein |
| | | | | | ref: NP_059088.1 (M. musculus) cadherin EGF LAG seven-pass G-type |
| | | | | | receptor 2 [Mus musculus] |
| 7936 | 160 | AA875495 | M, A, B, C, I | | Rattus norvegicus transcribed sequences |
| 24472 | 161 | AA875523 | L | | Rattus norvegicus transcribed sequence with strong similarity to protein |
| | | | | | sp: Q64119 (R. norvegicus) MLES_RAT Myosin light chain alkali, smooth- |
| | | | | | muscle isoform (MLC3SM) |
| 6153 | 162 | AA875531 | N | | |
| 15574 | 163 | AA875552 | H | | Rattus norvegicus transcribed sequence with strong similarity to protein |
| | | | | | ref: NP_084528.1 (M. musculus) hypothetical protein, MGC: 7764; hypothetical |
| | | | | | protein MGC7764 [Mus musculus] |
| 15295 | 164 | AA875594 | M, H, I | (FK506 binding protein 2, FK506-binding protein 1a) | (FK506 binding protein 2, FK506-binding protein 1a) |
| 15618 | 165 | AA875620 | M | | Rattus norvegicus transcribed sequences |
| 5384 | 166 | AA891041 | I | jun B proto-oncogene | jun B proto-oncogene |
| 1644 | 167 | AA891068 | A, F | Peptidylglycine alpha-amidating monooxygenase | Peptidylglycine alpha-amidating monooxygenase |
| 15833 | 168 | AA891171 | K | | Rattus norvegicus transcribed sequence with moderate similarity to protein |
| | | | | | ref: NP_004540.1 (H. sapiens) NADH dehydrogenase (ubiquinone) 1, |
| | | | | | subcomplex unknown, 2 (14.5 kD, B14.5b) [Homo sapiens] |
| 24235 | 169 | AA891286 | M, N, H, I | thioredoxin reductase 1 | thioredoxin reductase 1 |
| 9952 | 170 | AA891422 | N | hypoxia induced gene 1 | hypoxia induced gene 1 |
| 16446 | 171 | AA891423 | L | | Rattus norvegicus transcribed sequence with moderate similarity to protein |
| | | | | | ref: NP_078813.1 H. sapiens hypothetical protein FLJ12118 [Homo sapiens] |
| 9071 | 172 | AA891578 | N | | Rattus norvegicus transcribed sequences |
| 474 | 173 | AA891670 | N, D | | Rattus norvegicus transcribed sequence with moderate similarity to protein |
| | | | | | ref: NP_034894.1 (M. musculus) mannosidase 2, alpha B1; lysosomal alpha- |
| | | | | | mannosidase [Mus musculus] |
| 9091 | 174 | AA891690 | N | | Rattus norvegicus transcribed sequence with strong similarity to protein |
| | | | | | ref: NP_076006.1 (M. musculus) tumor necrosis factor (ligand) superfamily, |
| | | | | | member 13 [Mus musculus] |
| 17420 | 175 | AA891693 | M, N | | Rattus norvegicus transcribed sequences |
| 18078 | 176 | AA891726 | N | solute carrier family 34, member 1 | solute carrier family 34, member 1 |
| 20839 | 177 | AA891729 | N | ribosomal protein S27a | ribosomal protein S27a |
| 11959 | 178 | AA891735 | N, D | | Rattus norvegicus transcribed sequences |
| 17693 | 179 | AA891737 | N, J | | Rattus norvegicus transcribed sequences |
| 14970 | 180 | AA891738 | M, B, H, I, K | sulfite oxidase | sulfite oxidase |
| 17256 | 181 | AA891739 | M, C, E, I | | Rattus norvegicus transcribed sequence with weak similarity to protein |
| | | | | | ref: NP_496168.1 (C. elegans) F52H3.5.p [Caenorhabditis elegans] |
| 15110 | 182 | AA891764 | M, I | low density lipoprotein receptor-related protein 2 | low density lipoprotein receptor-related protein 2 |
| 18269 | 183 | AA891769 | M, D, L | | Rattus norvegicus focal adhesion kinase (FAK) mRNA, alternative 5′UTR |
| 9905 | 184 | AA891774 | M, A, I, K | | Rattus norvegicus transcribed sequences |
| 17289 | 185 | AA891785 | N, E | | Rattus norvegicus transcribed sequence with weak similarity to protein |
| | | | | | sp: P41562 (R. norvegicus) IDHC_RAT ISOCITRATE DEHYDROGENASE |
| | | | | | [NADP] CYTOPLASMIC (OXALOSUCCINATE DECARBOXYLASE) (IDH) |
| | | | | | (NADP+-SPECIFIC ICDH) (IDP) |
| 17290 | 185 | AA891785 | N, E | | Rattus norvegicus transcribed sequence with weak similarity to protein |
| | | | | | sp: P41562 (R. norvegicus) IDHC_RAT ISOCITRATE DEHYDROGENASE |
| | | | | | [NADP] CYTOPLASMIC (OXALOSUCCINATE DECARBOXYLASE) (IDH) |
| | | | | | (NADP+-SPECIFIC ICDH) (IDP) |
| 21672 | 186 | AA891789 | C, D | | Rattus norvegicus transcribed sequence with strong similarity to protein |
| | | | | | ref: NP_062742.1 (M. musculus) cDNA sequence AB025049 [Mus musculus] |
| 22124 | 187 | AA891790 | D | | Rattus norvegicus transcribed sequences |
| 18128 | 188 | AA891800 | I | | Rattus norvegicus transcribed sequence with moderate similarity to protein |
| | | | | | ref: NP_008834.1 (H. sapiens) inorganic pyrophosphattase [Homo sapiens] |
| 4463 | 189 | AA891831 | M, A, I | | Rattus norvegicus transcribed sequence with weak similarity to protein |
| | | | | | sp: P51652 (R. norvegicus) PE2R_RAT 20-alpha-hydroxysteroid |
| | | | | | dehydrogenase (20-alpha-HSD) (HSD1) |
| 20522 | 190 | AA891842 | N, L | | Rattus norvegicus transcribed sequence with weak similarity to protein |
| | | | | | ref: NP_057713.1 (H. sapiens) hypothetical protein LOC51323 [Homo sapiens] |
| 20523 | 190 | AA891842 | N, B, L | | Rattus norvegicus transcribed sequence with weak similarity to protein |
| | | | | | ref: NP_057713.1 (H. sapiens) hypothetical protein LOC51323 [Homo sapiens] |
| 17249 | 191 | AA891858 | N, K | | Rattus norvegicus transcribed sequence with moderate similarity to protein |
| | | | | | sp: O88338 (M. musculus) CADG_MOUSE Cadherin-16 precursor (Kidney- |
| | | | | | specific cadherin) (Ksp-cadherin) |
| 16023 | 192 | AA891872 | N | | Rattus norvegicus transcribed sequence with strong similarity to protein |
| | | | | | pir: S54876 (M. musculus) S54876 NAD(P)+ transhydrogenase (B-specific) (EC |
| | | | | | 1.6.1.1) precursor - mouse |
| 2576 | 193 | AA891884 | K | | Rattus norvegicus transcribed sequences |
| 17779 | 194 | AA891914 | N | | Rattus norvegicus transcribed sequence with moderate similarity to protein |
| | | | | | pir: A47488 (H. sapiens) A47488 aminoacylase (EC 3.5.1.14) - human |
| 17933 | 195 | AA891916 | K | membrane interacting protein of RGS16 | membrane interacting protein of RGS16 |
| 17438 | 196 | AA891943 | M | | Rattus norvegicus transcribed sequences |
| 1159 | 197 | AA891949 | M, N, D, I | | Rattus norvegicus transcribed sequences |
| 4473 | 198 | AA891965 | M, A, D, I | | Rattus norvegicus transcribed sequence with strong similarity to protein |
| | | | | | ref: NP_071297.1 (M. musculus) fructosamine 3 kinase [Mus musculus] |
| 17088 | 199 | AA891998 | B, L | sequestosome 1 | sequestosome 1 |
| 2107 | 200 | AA892006 | D, K | | Rattus norvegicus transcribed sequence with weak similarity to protein |
| | | | | | sp: P50517 (R. norvegicus) VAB2_MOUSE Vacuolar ATP synthase subunit B, |
| | | | | | brain isoform (V-ATPase B2 subunit) (Vacuolar proton pump B isoform 2) |
| | | | | | (Endomembrane proton pump 58 kDa subunit) |
| 17630 | 201 | AA892012 | N | glutamate oxaloacetate transaminase 2 | glutamate oxaloacetate transaminase 2 |
| 17345 | 202 | AA892014 | E | HLA-B-associated transcript 1A | HLA-B-associated transcript 1A |
| 23047 | 203 | AA892027 | M | | Rattus norvegicus transcribed sequences |
| 19252 | 204 | AA892041 | H | peroxiredoxin 6 | peroxiredoxin 6 |
| 13420 | 205 | AA892042 | N | | Rattus norvegicus transcribed sequence with weak similarity to protein |
| | | | | | pir: JC2534 (R. norvegicus) JC2534 RVLG protein - rat |
| 19469 | 206 | AA892112 | M, D | | Rattus norvegicus transcribed sequence with strong similarity to protein |
| | | | | | ref: NP_062419.2 (M. musculus) proline dehydrogenase (oxidase) 2; proline |
| | | | | | oxidase 1; kidney and liver profine oxidase 1 [Mus musculus] |
| 4259 | 207 | AA892123 | N | ribosomal protein L36 | ribosomal protein L36 |
| 14595 | 208 | AA892128 | N, B, L | | Rattus norvegicus transcribed sequences |
| 15576 | 209 | AA892132 | J | | Rattus norvegicus transcribed sequence with moderate similarity to protein |
| | | | | | ref: NP_060937.1 (H. sapiens) uncharacterized hematopoietic stem/progenitor |
| | | | | | cells protein MDS032 [Homo sapiens] |
| 16529 | 210 | AA892154 | N | | Rattus norvegicus transcribed sequence with moderate similarity to protein |
| | | | | | pdb: 1LBG (E. coli) B Chain B, Lactose Operon Repressor Bound To 21-Base |
| | | | | | Pair Symmetric Operator Dna, Alpha Carbons Only |
| 4482 | 211 | AA892173 | N | | Rattus norvegicus transcribed sequence |
| 8317 | 212 | AA892234 | M, N | | Rattus norvegicus transcribed sequence with strong similarity to protein |
| | | | | | ref: NP_079845.1 (M. musculus) microsomal glutathione S-transferase 3 [Mus |
| | | | | | musculus] |
| 4484 | 213 | AA892258 | N | NADPH oxidase 4 | NADPH oxidase 4 |
| 9073 | 214 | AA892273 | J | | Rattus norvegicus transcribed sequences |
| 18190 | 215 | AA892280 | M, N | | Rattus norvegicus transcribed sequences |
| 17717 | 216 | AA892287 | N | | Rattus norvegicus transcribed sequence with weak similarity to protein |
| | | | | | ref: NP_061123.2 (H. sapiens) G protein-coupled receptor, family C, group 5, |
| | | | | | member C, isoform b, precursor; orphan G-protein coupled receptor; retinoic |
| | | | | | acid inducible gene 3 protein; retinoic acid responsive gene protein [Homo |
| | | | | | sapiens] |
| 4373 | 217 | AA892310 | F | | Rattus norvegicus transcribed sequence with strong similarity to protein |
| | | | | | ref: NP_080731.1 (M. musculus) RIKEN cDNA 2510049I19 [Mus musculus] |
| 9027 | 218 | AA892312 | N | potassium inwardly-rectifying channel, subfamily J, | potassium inwardly-rectifying channel, subfamily J, member 16 |
| | | | | member 16 | |
| 17161 | 219 | AA892333 | M | alpha-tubulin | alpha-tubulin |
| 17684 | 220 | AA892345 | M, I | dimethylglycine dehydrogenase precursor | dimethylglycine dehydrogenase precursor |
| 13647 | 221 | AA892367 | N, G | | Rattus norvegicus transcribed sequence with strong similarity to protein |
| | | | | | sp: P21531 (R. norvegicus) RL3_RAT 60S RIBOSOMAL PROTEIN L3 (L4) |
| 19768 | 222 | AA892373 | M, C, G | syntenin | syntenin |
| 3474 | 223 | AA892378 | C | | Rattus norvegicus transcribed sequence with strong similarity to protein |
| | | | | | ref: NP_079838.1 (M. musculus) RIKEN cDNA 2010003O14 [Mus musculus] |
| 17682 | 224 | AA892382 | M, I | camello-like 1 | camello-like 1 |
| 820 | 225 | AA892395 | N | aldolase B | (Rattus norvegicus transcribed sequence with strong similarity to protein |
| | | | | | sp: P00884 (R. norvegicus) ALFB_RAT FRUCTOSE-BISPHOSPHATE |
| | | | | | ALDOLASE B (LIVER-TYPE ALDOLASE), aldolase B) |
| 12016 | 226 | AA892404 | N, C | Na+ dependent glucose transporter 1 | Na+ dependent glucose transporter 1 |
| 23194 | 227 | AA892417 | M | ephrin A1 | ephrin A1 |
| 16469 | 228 | AA892462 | A, C | | Rattus norvegicus transcribed sequence with strong similarity to protein |
| | | | | | ref: NP_079926.1 (M. musculus) RIKEN cDNA 0710008D09 [Mus musculus] |
| 13609 | 229 | AA892468 | M, H, I | protease, serine, 8 (prostasin) | protease, serine, 8 (prostasin) |
| 13610 | 229 | AA892468 | M, A, C, F, H, | protease, serine, 8 (prostasin) | protease, serine, 8 (prostasin) |
| | | | I, K | | |
| 11991 | 230 | AA892483 | B | | Rattus norvegicus transcribed sequences |
| 21695 | 231 | AA892506 | N, G | coronin, actin binding protein 1A | coronin, actin binding protein 1A |
| 4499 | 232 | AA892511 | N | | Rattus norvegicus transcribed sequence with weak similarity to protein |
| | | | | | ref: NP_077053.1 (R. norvegicus) calcium binding protein P22 [Rattus |
| | | | | | norvegicus] |
| 8599 | 233 | AA892522 | M, N, F | | Rattus norvegicus transcribed sequences |
| 15154 | 234 | AA892532 | N | protein disulfide isomerase-related protein | protein disulfide isomerase-related protein |
| 12275 | 235 | AA892541 | N | | Rattus norvegicus transcribed sequences |
| 12276 | 235 | AA892541 | M, N, D, L | | Rattus norvegicus transcribed sequences |
| 17468 | 236 | AA892545 | D | | Rattus norvegicus transcribed sequence with moderate similarity to protein |
| | | | | | ref: NP_032793.1 (M. musculus) organic cationic transporter-like 2 [Mus |
| | | | | | musculus] |
| 17469 | 237 | AA892549 | D | | Rattus norvegicus transcribed sequences |
| 18906 | 238 | AA892561 | M, I | | Rattus norvegicus transcribed sequence with moderate similarity to protein |
| | | | | | ref: NP_054758.1 (H. sapiens) PTD012 protein [Homo sapiens] |
| 18274 | 239 | AA892572 | N | | Rattus norvegicus transcribed sequence with strong similarity to protein |
| | | | | | ref: NP_079639.1 (M. musculus) RIKEN cDNA 1110001J03 [Mus musculus] |
| 18275 | 239 | AA892572 | N, K | | Rattus norvegicus transcribed sequence with strong similarity to protein |
| | | | | | ref: NP_079639.1 (M. musculus) RIKEN cDNA 1110001J03 [Mus musculus] |
| 4512 | 240 | AA892578 | N | | Rattus norvegicus transcribed sequence with strong similarity to protein |
| | | | | | ref: NP_116238.1 (H. sapiens) hypothetical protein FLJ14834 [Homo sapiens] |
| 15876 | 241 | AA892582 | N, G | aldehyde dehydrogenase family 3, member A1 | aldehyde dehydrogenase family 3, member A1 |
| 19085 | 242 | AA892598 | M | nucleostemin | nucleostemin |
| 19086 | 242 | AA892598 | M | nucleostemin | nucleostemin |
| 17500 | 243 | AA892616 | N | solute carrier family 13 (sodium-dependent | solute carrier family 13 (sodium-dependent dicarboxylate transporter), |
| | | | | dicarboxylate transporter), member 3 | member 3 |
| 20088 | 244 | AA892666 | K | | Rattus norvegicus transcribed sequences |
| 23783 | 245 | AA892773 | M, N, I, K | | Rattus norvegicus transcribed sequence with moderate similarity to protein |
| | | | | | pdb: 1LBG (E. coli) B Chain B, Lactose Operon Repressor Bound To 21-Base |
| | | | | | Pair Symmetric Operator Dna, Alpha Carbons Only |
| 19251 | 246 | AA892796 | C | | Rattus norvegicus transcribed sequences |
| 13542 | 247 | AA892798 | N, B | uterine sensitization-associated gene 1 protein | uterine sensitization-associated gene 1 protein |
| 22537 | 248 | AA892799 | M, A, D | | Rattus norvegicus transcribed sequence with weak similarity to protein |
| | | | | | ref: NP_113808.1 (R. norvegicus) 3-phosphoglycerate dehydrogenase [Rattus |
| | | | | | norvegicus] |
| 22538 | 248 | AA892799 | M, D | | Rattus norvegicus transcribed sequence with weak similarity to protein |
| | | | | | ref: NP_113808.1 (R. norvegicus) 3-phosphoglycerate dehydrogenase [Rattus |
| | | | | | norvegicus] |
| 22539 | 248 | AA892799 | M, N | | Rattus norvegicus transcribed sequence with weak similarity to protein |
| | | | | | ref: NP_113808.1 (R. norvegicus) 3-phosphoglycerate dehydrogenase [Rattus |
| | | | | | norvegicus] |
| 15385 | 249 | AA892808 | N | isocitrate dehydrogenase 3, gamma | isocitrate dehydrogenase 3, gamma |
| 408 | 250 | AA892810 | M | low density lipoprotein receptor-related protein | low density lipoprotein receptor-related protein associated protein 1 |
| | | | | associated protein 1 | |
| 4529 | 251 | AA892818 | M | | Rattus norvegicus transcribed sequence with weak similarity to protein |
| | | | | | pir: S54293 (R. norvegicus) S54293 regulator protein p122-RhoGAP - rat |
| 23321 | 252 | AA892821 | M | aldo-keto reductase family 7, member A2 (aflatoxin | aldo-keto reductase family 7, member A2 (aflatoxin aldehyde reductase) |
| | | | | aldehyde reductase) | |
| 23322 | 252 | AA892821 | N | aldo-keto reductase family 7, member A2 (aflatoxin | aldo-keto reductase family 7, member A2 (aflatoxin aldehyde reductase) |
| | | | | aldehyde reductase) | |
| 17332 | 253 | AA892829 | J | | Rattus norvegicus transcribed sequence with strong similarity to protein |
| | | | | | prf: 2204316A (M. musculus) 2204316A ATP sulfurylase-adenosine |
| | | | | | phosphosulfate kinase [Mus musculus] |
| 17923 | 254 | AA892843 | D | | Rattus norvegicus transcribed sequence with moderate similarity to protein |
| | | | | | ref: NP_078816.1 (H. sapiens) hypothetical protein FLJ20917 [Homo sapiens] |
| 18887 | 255 | AA892860 | J | | Rattus norvegicus transcribed sequence with strong similarity to protein |
| | | | | | pir: S25716 (M. musculus) S25716 Ras guanine nucleotide exchange factor |
| | | | | | son-of-sevenless (sos) 1 - mouse |
| 9053 | 256 | AA892861 | M, I | | Rattus norvegicus transcribed sequences |
| 12848 | 257 | AA892916 | N, H, K | | Rattus norvegicus Ab2-305 mRNA, complete cds |
| 3438 | 258 | AA892921 | K | | Rat mRNA fragment with B2 repetitive sequence (clone pAR24) |
| 14465 | 259 | AA892950 | K | | Rattus norvegicus transcribed sequence with moderate similarity to protein |
| | | | | | pdb: 1G5I (M. musculus) A Chain A, Crystal Structure Of The Accessory |
| | | | | | Subunit Of Murine Mitochondrial Polymerase Gamma |
| 3853 | 260 | AA892999 | N, K | | Rattus norvegicus transcribed sequences |
| 3439 | 261 | AA893000 | N, B | | Rattus norvegicus transcribed sequence with strong similarity to protein |
| | | | | | pir: T00335 (H. sapiens) T00335 hypothetical protein KIAA0564 - human |
| | | | | | (fragment) |
| 12020 | 262 | AA693035 | N | HP33 | HP33 |
| 3863 | 263 | AA893060 | C, D | | Rattus norvegicus transcribed sequences |
| 13332 | 264 | AA893080 | M, K | | Rattus norvegicus transcribed sequences |
| 21305 | 265 | AA893082 | M, D, H, I | | Rattus norvegicus transcribed sequences |
| 3870 | 266 | AA893147 | N, F, G | | Rattus norvegicus transcribed sequences |
| 16881 | 267 | AA893185 | J | | Rattus norvegicus transcribed sequence with moderate similarity to protein |
| | | | | | ref: NP_002483.1 (H. sapiens) NADH dehydrogenase (ubiquinone) 1 beta |
| | | | | | subcomplex, 5 (16 kD, SGDH) [Homo sapiens] |
| 17447 | 268 | AA893192 | M | | Rattus norvegicus transcribed sequences |
| 17744 | 269 | AA893206 | M | | Rattus norvegicus transcribed sequence with weak similarity to protein |
| | | | | | ref: NP_062289.1 (M. musculus) nuclear localization signals binding protein 1 |
| | | | | | [Mus musculus] |
| 3878 | 270 | AA893230 | M | | Rattus norvegicus transcribed sequence with weak similarity to protein |
| | | | | | sp: P02593 (R. norvegicus) CALM_HUMAN Calmodulin |
| 548 | 271 | AA893235 | N | | Rattus norvegicus transcribed sequence with strong similarity to protein |
| | | | | | sp: Q61585 (M. musculus) G0S2_MOUSE Putative lymphocyte G0/G1 switch |
| | | | | | protein 2 (G0S2-like protein) |
| 17752 | 272 | AA893244 | N | | Rattus norvegicus transcribed sequences |
| 18967 | 273 | AA893260 | N, H | | Rattus norvegicus transcribed sequence with weak similarity to protein |
| | | | | | ref: NP_083358.1 (M. musculus) RIKEN cDNA 5830411J07 [Mus musculus] |
| 16168 | 274 | AA893280 | M, J | | Rattus norvegicus transcribed sequence with weak similarity to protein |
| | | | | | sp: P43884 (R. norvegicus) PLIN_RAT Perilipin (PERI) (Lipid droplet- |
| | | | | | associated protein) |
| 3886 | 275 | AA893289 | J | | Rattus norvegicus transcribed sequence with moderate similarity to protein |
| | | | | | pdb: 1LBG (E. coli) B Chain B, Lactose Operon Repressor Bound To 21-Base |
| | | | | | Pair Symmetric Operator Dna, Alpha Carbons Only |
| 4242 | 276 | AA893325 | N | ornithine aminotransferase | ornithine aminotransferase |
| 9082 | 277 | AA893357 | M | | Rattus norvegicus transcribed sequences |
| 17800 | 278 | AA893436 | K | | Rattus norvegicus transcribed sequences |
| 3465 | 279 | AA893611 | M, B, F | | Rattus norvegicus transcribed sequence with moderate similarity to protein |
| | | | | | sp: O09015 (R. norvegicus) MXI1_RAT MAX interacting protein 1 (MXI1 |
| | | | | | protein) |
| 17836 | 280 | AA893626 | D | | Rattus norvegicus transcribed sequence with weak similarity to protein |
| | | | | | ref: NP_112249.1 (R. norvegicus) guanine nucleotide-binding protein, beta-1# |
| | | | | | subunit [Rattus norvegicus] |
| 4542 | 281 | AA893643 | C | | Rattus norvegicus transcribed sequence with weak similarity to protein |
| | | | | | ref: NP_113981.1 (R. norvegicus) matrin cyclophilin (matrin-cyp) [Rattus |
| | | | | | norvegicus] |
| 7505 | 282 | AA893702 | N, A | transcobalamin II precursor | transcobalamin II precursor |
| 9084 | 283 | AA893717 | N, E | | Rattus norvegicus transcribed sequence with strong similarity to protein |
| | | | | | ref: NP_036155.1 (M. musculus) Rac GTPase-activating protein 1 [Mus |
| | | | | | musculus] |
| 12031 | 284 | AA893860 | M, I | | Rattus norvegicus transcribed sequence with strong similarity to protein |
| | | | | | ref: NP_149065.1 (M. musculus) hypothetical protein D15Wsu59e [Mus |
| | | | | | musculus] |
| 2128 | 285 | AA894008 | B | | Rattus norvegicus transcribed sequence with moderate similarity to protein |
| | | | | | ref: NP_446379.1 (R. norvegicus) erythrocyte protein band 4.1-like 3 [Rattus |
| | | | | | norvegicus] |
| 10540 | 286 | AA894027 | N | | |
| 3895 | 287 | AA894029 | N | | Rattus norvegicus transcribed sequences |
| 2191 | 288 | AA894086 | F | | Rattus norvegicus Ac1133 mRNA, complete cds |
| 2979 | 289 | AA894099 | H | vacuolar protein sorting protein 4a | vacuolar protein sorting protein 4a |
| 16435 | 290 | AA894174 | N | | Rattus norvegicus transcribed sequence with strong similarity to protein |
| | | | | | pir: A31568 (R. norvegicus) A31568 electron transfer flavoprotein alpha chain |
| | | | | | precursor - rat |
| 22783 | 291 | AA894207 | A, F | | Rattus norvegicus focal adhesion kinase (FAK) mRNA, alternative 5′UTR |
| 16849 | 292 | AA894298 | N | membrane metallo endopeptidase | membrane metallo endopeptidase |
| 21587 | 293 | AA899141 | D | 3-phosphoglycerate dehydrogenase | 3-phosphoglycerate dehydrogenase |
| 24329 | 294 | AA899253 | N | myristoylated alanine rich protein kinase C substrate | myristoylated alanine rich protein kinase C substrate |
| 22490 | 295 | AA899289 | A | | Rattus norvegicus transcribed sequence with strong similarity to protein |
| | | | | | ref: NP_055787.1 (H. sapiens) KIAA1049 protein [Homo sapiens] |
| 4661 | 296 | AA899709 | M, B, L | receptor (calcitonin) activity modifying protein 3 | receptor (calcitonin) activity modifying protein 3 |
| 21354 | 297 | AA899721 | B, L | | Rattus norvegicus transcribed sequences |
| 23778 | 298 | AA899854 | N, E | topoisomerase (DNA) 2 alpha | topoisomerase (DNA) 2 alpha |
| 9114 | 299 | AA899951 | M | | Rattus norvegicus transcribed sequences |
| 9541 | 300 | AA900505 | N, L | rhoB gene | rhoB gene |
| 3822 | 301 | AA900863 | M, H | | Rattus norvegicus transcribed sequence with weak similarity to protein |
| | | | | | sp: Q63413 (R. norvegicus) HE47_RAT Probable ATP-dependent RNA |
| | | | | | helicase p47 |
| 3959 | 302 | AA901338 | M | | Rattus norvegicus transcribed sequence with weak similarity to protein |
| | | | | | pir: A47305 (R. norvegicus) A47305 translation initiation factor eIF-5 - rat |
| 12355 | 303 | AA923857 | D | Carcinoembryonic antigen gene family (CGM3) | Carcinoembryonic antigen gene family (CGM3) |
| 6736 | 304 | AA924005 | C | | Rattus norvegicus transcribed sequence with moderate similarity to protein |
| | | | | | ref: NP_034081.1 (M. musculus) insulin-like growth factor 2, binding protein 1; |
| | | | | | coding region determinant binding protein; zipcode-binding protein 1; zipcode |
| | | | | | binding protein 1 [Mus musculus] |
| 17477 | 305 | AA924029 | M, K, L | phospholipid scramblase 1 | phospholipid scramblase 1 |
| 24192 | 306 | AA924210 | H | 3-hydroxy-3-methylglutaryl-Coenzyme A reductase | 3-hydroxy-3-methylglutaryl-Coenzyme A reductase |
| 20711 | 307 | AA924267 | N, L | cytochrome P450, 4A1 | cytochrome P450, 4A1 |
| 4933 | 308 | AA924301 | M, A | | Rattus norvegicus transcribed sequences |
| 23093 | 309 | AA924342 | G | | Rattus norvegicus transcribed sequence with strong similarity to protein |
| | | | | | ref: NP_064571.1 (H. sapiens) DC11 protein [Homo sapiens] |
| 4944 | 310 | AA924405 | M, H, I, K | | Rattus norvegicus transcribed sequence with weak similarity to protein |
| | | | | | ref: NP_068522.1 (R. norvegicus) Nopp140 associated protein [Rattus |
| | | | | | norvegicus] |
| 3631 | 311 | AA924460 | D | | Rattus norvegicus transcribed sequence with weak similarity to protein |
| | | | | | sp: Q9JHI7 (M. musculus) PMC1_MOUSE Polymyositis/scleroderma |
| | | | | | autoantigen 1 (Autoantigen PM/Scl 1) (Polymyositis/scleroderma autoantigen |
| | | | | | 75 kDa) (PM/Scl-75) (P75 polymyositis-scleroderma overlap syndrome |
| | | | | | associated autoantigen) |
| 22984 | 312 | AA924560 | E | | Rattus norvegicus transcribed sequence with strong similarity to protein |
| | | | | | pir: T12449 (H. sapiens) T12449 hypothetical protein DKFZp564E1616.1 - |
| | | | | | human (fragments) |
| 22540 | 313 | AA924630 | E | | Rattus norvegicus transcribed sequence with weak similarity to protein |
| | | | | | ref: NP_113808.1 (R. norvegicus) 3-phosphoglycerate dehydrogenase [Rattus |
| | | | | | norvegicus] |
| 23123 | 314 | AA924794 | K | | Rattus norvegicus transcribed sequence with weak similarity to protein |
| | | | | | sp: Q9Z1P2 (R. norvegicus) AAC1_RAT Alpha-actinin 1 (Alpha-actinin |
| | | | | | cytoskeletal isoform) (Non-muscle alpha-actinin 1) (F-actin cross linking |
| | | | | | protein) |
| 23195 | 315 | AA925026 | M | | Rattus norvegicus transcribed sequence with weak similarity to protein |
| | | | | | sp: P27435 (R. norvegicus) MCT7_RAT Mast cell protease 7 precursor (RMCP- |
| | | | | | 7) (Tryptase, skin) |
| 21458 | 316 | AA925049 | M | | Rattus norvegicus transcribed sequence with strong similarity to protein |
| | | | | | pdb: 1BGM (E. coli) O Chain O, Beta-Galactosidase (Chains I-P) |
| 14790 | 317 | AA925087 | M | | Rattus norvegicus transcribed sequences |
| 23261 | 318 | AA925145 | M, I | | Rattus norvegicus transcribed sequence with weak similarity to protein |
| | | | | | ref: NP_110477.1 (R. norvegicus) betaine-homocysteine methyltransferase |
| | | | | | [Rattus norvegicus] |
| 17363 | 319 | AA925150 | F, K | | Rattus norvegicus transcribed sequence with weak similarity to protein |
| | | | | | prf: 2118320A (R. norvegicus) 2118320A neurodegeneration-associated |
| | | | | | protein 1 [Rattus norvegicus] |
| 18271 | 320 | AA925267 | M, I | | Rattus norvegicus transcribed sequence with moderate similarity to protein |
| | | | | | ref: NP_055993.1 (H. sapiens) KIAA0717 protein [Homo sapiens] |
| 5129 | 321 | AA925335 | J | | Rattus norvegicus transcribed sequences |
| 23978 | 322 | AA925352 | M, L | | Rattus norvegicus transcribed sequences |
| 22479 | 323 | AA925418 | B, L | | Rattus norvegicus transcribed sequences |
| 17514 | 324 | AA925554 | E, G | succinate dehydrogenase complex, subunit A, | succinate dehydrogenase complex, subunit A, flavoprotein (Fp) |
| | | | | flavoprotein (Fp) | |
| 5183 | 325 | AA925662 | L | | Rattus norvegicus transcribed sequence with weak similarity to protein |
| | | | | | sp: Q9JK41 (R. norvegicus) COP1_RAT High-affinity copper uptake protein 1 |
| | | | | | (rCTR1) (Copper transporter 1) |
| 5205 | 326 | AA925747 | K | | Rattus norvegicus transcribed sequences |
| 5206 | 327 | AA925755 | E | glutaminase | glutaminase |
| 20866 | 328 | AA926098 | J | | Rattus norvegicus transcribed sequence with moderate similarity to protein |
| | | | | | ref: NP_444278.1 (H. sapiens) mitochondrial ribosomal protein L53 [Homo |
| | | | | | sapiens] |
| 17157 | 329 | AA926129 | M, N | | Rattus norvegicus transcribed sequence with strong similarity to protein |
| | | | | | ref: NP_446139.1 (R. norvegicus) schlafen 4 [Rattus norvegicus] |
| 16468 | 330 | AA926137 | N, A | | Rattus norvegicus transcribed sequence with strong similarity to protein |
| | | | | | ref: NP_079926.1 (M. musculus) RIKEN cDNA 0710008D09 [Mus musculus] |
| 13411 | 331 | AA926196 | M | | Rattus norvegicus transcribed sequences |
| 5295 | 332 | AA926247 | M, L | putative potassium channel TWIK | putative potassium channel TWIK |
| 21513 | 333 | AA926261 | H | | Rattus norvegicus transcribed sequences |
| 22928 | 334 | AA926262 | M | neuronal regeneration related protein | neuronal regeneration related protein |
| 894 | 335 | AA926305 | E | | Rattus norvegicus transcribed sequences |
| 15028 | 336 | AA942685 | N, F | cytosolic cysteine dioxygenase 1 | cytosolic cysteine dioxygenase 1 |
| 6039 | 337 | AA942716 | M, G | | Rattus norvegicus HN1 mRNA, complete cds |
| 23005 | 338 | AA942770 | I | | Rattus norvegicus transcribed sequences |
| 21318 | 339 | AA942774 | M | | Rattus norvegicus transcribed sequences |
| 18168 | 340 | AA942995 | E | | Rattus norvegicus transcribed sequence with weak similarity to protein |
| | | | | | pir: T14346 (M. musculus) T14346 herc2 protein - mouse |
| 6691 | 341 | AA943028 | J | | Rattus norvegicus transcribed sequence with strong similarity to protein |
| | | | | | pir: S16385 (R. norvegicus) S16385 macrophage colony-stimulating factor 1 |
| | | | | | receptor precursor - rat |
| 22180 | 342 | AA943202 | D | | Rattus norvegicus transcribed sequence with strong similarity to protein |
| | | | | | ref: NP_445869.1 (R. norvegicus) GRB2-associated binding protein 2 [Rattus |
| | | | | | norvegicus] |
| 21990 | 343 | AA943524 | C | | Rattus norvegicus transcribed sequences |
| 12673 | 344 | AA943773 | D, L | | Rattus norvegicus transcribed sequence with moderate similarity to protein |
| | | | | | sp: P43406 (M. musculus) ITAV_MOUSE Integrin alpha-V precursor |
| | | | | | (Vitronectin receptor alpha subunit) (CD51) |
| 18285 | 345 | AA943791 | F | | Rattus norvegicus transcribed sequences |
| 21696 | 346 | AA944324 | N, C | ADP-ribosylation factor 6 | ADP-ribosylation factor 6 |
| 22681 | 347 | AA944413 | M, I | | |
| 6711 | 348 | AA944439 | M | | Rattus norvegicus transcribed sequence with strong similarity to protein |
| | | | | | sp: Q9JHN8 (M. musculus) ST19_MOUSE Serine/threonine-protein kinase 19 |
| | | | | | (RP1 protein) |
| 14763 | 349 | AA944481 | L | | Rattus norvegicus transcribed sequence with weak similarity to protein |
| | | | | | sp: P57756 (R. norvegicus) FCN2_RAT Ficolin 2 precursor (Collagen/fibrinogen |
| | | | | | domain-containing protein 2) (Ficolin-B) (Ficolin B) (Serum lectin P35) (EBP- |
| | | | | | 37) (Hucolin) |
| 22536 | 350 | AA944803 | K | | R. norvegicus mRNA for parathyroid hormone regulated sequence (202 bp) |
| 22501 | 351 | AA944811 | H | putative zinc finger protein SERZ-1 | putative zinc finger protein SERZ-1 |
| 11974 | 352 | AA944958 | M | | R. norvegicus mRNA for 3′UTR of CDK6 (unknown) protein |
| 22554 | 353 | AA945076 | M, I | glycerol kinase | glycerol kinase |
| 1798 | 354 | AA945569 | M, D | pregnancy-zone protein | pregnancy-zone protein |
| 15175 | 355 | AA945583 | E | hydroxysteroid (17-beta) dehydrogenase 10 | hydroxysteroid (17-beta) dehydrogenase 10 |
| 20812 | 356 | AA945611 | N | ribosomal protein L10 | ribosomal protein L10 |
| 22612 | 357 | AA945624 | M, I | | Rattus norvegicus transcribed sequence with weak similarity to protein |
| | | | | | pir: A34162 (R. norvegicus) A34162 NAD(P)H dehydrogenase (quinone) (EC |
| | | | | | 1.6.99.2) - rat |
| 22618 | 358 | AA945656 | E | | Rattus norvegicus transcribed sequences |
| 22625 | 359 | AA945704 | H | | Rattus norvegicus transcribed sequences |
| 22656 | 360 | AA945818 | M, H | | Rattus norvegicus transcribed sequence with strong similarity to protein |
| | | | | | ref: NP_064624.1 (H. sapiens) small protein effector 1 of Cdc42 [Homo |
| | | | | | sapiens] |
| 22351 | 361 | AA945867 | N | v-jun sarcoma virus 17 oncogene homolog (avian) | v-jun sarcoma virus 17 oncogene homolog (avian) |
| 5565 | 362 | AA945879 | M, C | Bardet-Biedl syndrome 2 (human) | Bardet-Biedl syndrome 2 (human) |
| 21976 | 363 | AA946011 | B | | Rattus norvegicus transcribed sequences |
| 18524 | 364 | AA946017 | D | | Rattus norvegicus transcribed sequences |
| 20832 | 365 | AA946040 | A | | Rattus norvegicus transcribed sequence with strong similarity to protein |
| | | | | | ref: NP_079904.1 (M. musculus) RIKEN cDNA 2010000G05 [Mus musculus] |
| 18337 | 366 | AA946046 | M, I | | Rattus norvegicus transcribed sequences |
| 825 | 367 | AA946108 | M, A | laminin 5 alpha 3 | laminin 5 alpha 3 |
| 21157 | 368 | AA946189 | I | | Rattus norvegicus transcribed sequence with strong similarity to protein |
| | | | | | pir: A36983 (M. musculus) A36983 RNA1 homolog fug1 - mouse |
| 22770 | 369 | AA946428 | D | | Rattus norvegicus transcribed sequences |
| 12331 | 370 | AA946466 | M, H | X-prolyl aminopeptidase (aminopeptidase P) 2, | X-prolyl aminopeptidase (aminopeptidase P) 2, membrane-bound |
| | | | | membrane-bound | |
| 12332 | 370 | AA946466 | M, G | X-prolyl aminopeptidase (aminopeptidase P) 2, | X-prolyl aminopeptidase (aminopeptidase P) 2, membrane-bound |
| | | | | membrane-bound | |
| 17499 | 371 | AA946467 | M | | Rattus norvegicus transcribed sequences |
| 1809 | 372 | AA946503 | G, K | lipocalin 2 | lipocalin 2 |
| 9452 | 373 | AA955206 | M | fibrinogen-like 2 | fibrinogen-like 2 |
| 23512 | 374 | AA955282 | M | | Rattus norvegicus transcribed sequences |
| 22596 | 375 | AA955298 | M | | Rattus norvegicus transcribed sequence with weak similarity to protein |
| | | | | | ref: NP_072143.1 (R. norvegicus) nucleolin-related protein NRP (NRP) [Rattus |
| | | | | | norvegicus] |
| 19347 | 376 | AA955334 | D | | |
| 23532 | 377 | AA955347 | E | | |
| 23533 | 378 | AA955350 | E | | Rattus norvegicus transcribed sequences |
| 23546 | 379 | AA955393 | I | | Rattus norvegicus transcribed sequences |
| 23626 | 380 | AA955540 | D | | Rattus norvegicus transcribed sequences |
| 23718 | 381 | AA955790 | A | unr protein | unr protein |
| 498 | 382 | AA956278 | M | | Rattus norvegicus transcribed sequences |
| 23758 | 383 | AA956414 | C, G | | Rattus norvegicus transcribed sequence with weak similarity to protein |
| | | | | | pir: B34252 (R. norvegicus) B34252 acyl-CoA dehydrogenase (EC 1.3.99.3) |
| | | | | | short-chain-specific precursor, hepatic - rat |
| 23790 | 384 | AA956499 | D | | Rattus norvegicus transcribed sequence with strong similarity to protein |
| | | | | | ref: NP_060640.1 (H. sapiens) hypothetical protein FLJ10656 [Homo sapiens] |
| 19936 | 385 | AA956517 | D | ceroid-lipofuscinosis, neuronal 2 | ceroid-lipofuscinosis, neuronal 2 |
| 23834 | 386 | AA956659 | C | | Rattus norvegicus transcribed sequences |
| 23839 | 387 | AA956684 | D | | Rattus norvegicus transcribed sequences |
| 18288 | 388 | AA956813 | C | | Rattus norvegicus transcribed sequence with moderate similarity to protein |
| | | | | | pir: JC4761 (M. musculus) JC4761 recombination activating gene 1 inducing |
| | | | | | protein - mouse |
| 5990 | 389 | AA956907 | M | | Rattus norvegicus transcribed sequence with weak similarity to protein |
| | | | | | ref: NP_113997.1 (R. norvegicus) cyclic nucleotide-gated channel beta subunit |
| | | | | | 1 [Rattus norvegicus] |
| 23957 | 390 | AA957123 | M | | Rattus norvegicus transcribed sequence with moderate similarity to protein |
| | | | | | ref: NP_033879.1 (M. musculus) brain expressed X-linked 2 [Mus musculus] |
| 23958 | 391 | AA957125 | E | | Rattus norvegicus transcribed sequences |
| 16731 | 392 | AA957244 | D | | |
| 23314 | 393 | AA957270 | H, I | tumor necrosis factor receptor superfamily, member | tumor necrosis factor receptor superfamily, member 12a |
| | | | | 12a | |
| 2702 | 394 | AA957307 | M, I, J | | Rattus norvegicus transcribed sequence with strong similarity to protein |
| | | | | | sp: P26638 (M. musculus) SYS_MOUSE Seryl-tRNA synthetase (Serine - tRNA |
| | | | | | ligase) (SerRS) |
| 23843 | 395 | AA957410 | D | | Rattus norvegicus transcribed sequences |
| 24051 | 396 | AA957452 | J | | Rattus norvegicus transcribed sequence |
| 17523 | 397 | AA963240 | D | | Rattus norvegicus transcribed sequences |
| 24246 | 398 | AA963703 | H | | |
| 2195 | 399 | AA963746 | M | | Rattus norvegicus transcribed sequences |
| 9309 | 400 | AA963794 | E | | Rattus norvegicus transcribed sequence with weak similarity to protein |
| | | | | | sp: Q09167 (R. norvegicus) SFR5_RAT Splicing factor, arginine/serine-rich 5 |
| | | | | | (Pre-mRNA splicing factor SRP40) (Insulin-induced growth response protein |
| | | | | | CL-4) (Delayed-early protein HRS) |
| 2232 | 401 | AA963990 | D | | Rattus norvegicus transcribed sequences |
| 2282 | 402 | AA964147 | F | | Rattus norvegicus transcribed sequences |
| 2113 | 403 | AA964275 | D | | Rattus norvegicus transcribed sequence with weak similarity to protein |
| | | | | | ref: NP_079792.1 (M. musculus) serologically defined breast cancer antigen |
| | | | | | 84 [Mus musculus] |
| 2423 | 404 | AA964611 | D | | Rattus norvegicus transcribed sequences |
| 2457 | 405 | AA964752 | L | | Rattus norvegicus transcribed sequence with weak similarity to protein |
| | | | | | sp: P97852 (R. norvegicus) DHB4_RAT Estradiol 17 beta-dehydrogenase 4 (17- |
| | | | | | beta-HSD 4) (17-beta-hydroxysteroid dehydrogenase 4) (HSD IV) |
| 24233 | 406 | AA964756 | F | centrin 2 | centrin 2 |
| 12561 | 407 | AA964815 | M, C | | Rattus norvegicus transcribed sequences |
| 11324 | 408 | AA964832 | J, L | | |
| 21339 | 409 | AA964962 | J, L | ATP-binding cassette, sub-family A (ABC1), member 1 | ATP-binding cassette, sub-family A (ABC1), member 1 |
| 2563 | 410 | AA965113 | K | | Rattus norvegicus transcribed sequence with strong similarity to protein |
| | | | | | ref: NP_080588.1 (M. musculus) RIKEN cDNA 2610029G23 [Mus musculus] |
| 2569 | 411 | AA965122 | K | | Rattus norvegicus transcribed sequence with strong similarity to protein |
| | | | | | ref: NP_035433.1 (M. musculus) retinal short-chain dehydrogenase/reductase |
| | | | | | 1 [Mus musculus] |
| 645 | 412 | AA965132 | G, K | solute carrier family 12, member 3 | solute carrier family 12, member 3 |
| 2905 | 413 | AA996727 | M | | Rattus norvegicus transcribed sequences |
| 2964 | 414 | AA996954 | F | | Rattus norvegicus transcribed sequences |
| 20694 | 415 | AA997048 | M, I | | Rattus norvegicus transcribed sequences |
| 3145 | 416 | AA997237 | D | | Rattus norvegicus transcribed sequences |
| 3172 | 417 | AA997406 | B | | Rattus norvegicus transcribed sequence with strong similarity to protein |
| | | | | | sp: P48004 (R. norvegicus) PSA7_RAT Proteasome subunit alpha type 7 |
| | | | | | (Proteasome subunit RC6-1) |
| 12616 | 418 | AA997599 | E | | Rattus norvegicus transcribed sequences |
| 3020 | 419 | AA997656 | L | | Rattus norvegicus transcribed sequences |
| 3053 | 420 | AA997726 | H | | Rattus norvegicus transcribed sequence with strong similarity to protein |
| | | | | | sp: Q14690 (H. sapiens) RRP5_HUMAN RRP5 protein homolog (Fragment) |
| 3269 | 421 | AA997800 | E | | Rattus norvegicus transcribed sequence with moderate similarity to protein |
| | | | | | pir: T30249 (M. musculus) T30249 cell proliferation antigen Ki-67 - mouse |
| 20035 | 422 | AA997933 | M, H | Nopp140 associated protein | Nopp140 associated protein |
| 3407 | 423 | AA997953 | F | TCF3 (E2A) fusion partner (in childhood leukemia) | TCF3 (E2A) fusion partner (in childhood leukemia) |
| 21959 | 424 | AA997973 | D, E | core binding factor beta | core binding factor beta |
| 16625 | 425 | AA998062 | D | | Rattus norvegicus transcribed sequence with weak similarity to protein |
| | | | | | ref: NP_034202.1 (M. musculus) dolichol-phosphate (beta-D) |
| | | | | | mannosyltransferase 1 [Mus musculus] |
| 3572 | 426 | AA998516 | E | | Rattus norvegicus transcribed sequence with weak similarity to protein |
| | | | | | sp: P30277 (R. norvegicus) CGB1_RAT G2/mitotic-specific cyclin B1 |
| 2782 | 427 | AA998565 | J | cyclin-dependent kinase inhibitor 1C, p57 | cyclin-dependent kinase inhibitor 1C, p57 |
| 22737 | 428 | AA998660 | L | | Rattus norvegicus transcribed sequence with weak similarity to protein |
| | | | | | ref: NP_446222.1 (R. norvegicus) Arg/Abl-interacting protein ArgBP2 [Rattus |
| | | | | | norvegicus] |
| 17734 | 429 | AA998683 | M, C, I | heat shock 27 kDa protein 1 | heat shock 27 kDa protein 1 |
| 11558 | 430 | AA998894 | D | | Rattus norvegicus transcribed sequence with strong similarity to protein |
| | | | | | ref: NP_079615.1 (M. musculus) RIKEN cDNA 0610027O18 [Mus musculus] |
| 3069 | 431 | AA998910 | G | | Rattus norvegicus transcribed sequence with strong similarity to protein |
| | | | | | ref: NP_109674.1 (M. musculus) endoplasmic reticulum chaperone SIL1 |
| | | | | | homolog (S. cerevisiae) [Mus musculus] |
| 3079 | 432 | AA999169 | M | | |
| 21211 | 433 | AB000098 | C | MIPP65 protein | MIPP65 protein |
| 1962 | 434 | AB000199 | J | CCA2 protein | CCA2 protein |
| 1509 | 435 | AB000507 | N, A | aquaporin 7 | aquaporin 7 |
| 17337 | 436 | AB000717 | N | | |
| 1535 | 437 | AB000778 | F | phospholipase D gene 1 | phospholipase D gene 1 |
| 1382 | 438 | AB002406 | G | ruvB-like protein 1 | ruvB-like protein 1 |
| 7914 | 439 | AB002584 | N | beta-alanine-pyruvate aminotransferase | beta-alanine-pyruvate aminotransferase |
| 1510 | 440 | AB004559 | M, D, K | solute carrier family 22 (organic anion transporter), | solute carrier family 22 (organic anion transporter), member 6 |
| | | | | member 6 | |
| 20708 | 441 | AB006461 | A | neurochondrin | neurochondrin |
| 3512 | 442 | AB006607 | F | choline/ethanolamine kinase | choline/ethanolamine kinase |
| 15750 | 443 | AB007690 | H | homer, neuronal immediate early gene, 2 | homer, neuronal immediate early gene, 2 |
| 15703 | 444 | AB009372 | N | lysophospholipase | lysophospholipase |
| 15662 | 445 | AB010119 | N, G | t-complex testis expressed 1 | t-complex testis expressed 1 |
| 1857 | 446 | AB010428 | L | cytosolic acyl-CoA thioesterase 1 | cytosolic acyl-CoA thioesterase 1 |
| 15701 | 447 | AB010467 | A, I | ATP-binding cassette, sub-family C (CFTR/MRP), | ATP-binding cassette, sub-family C (CFTR/MRP), member 3 |
| | | | | member 3 | |
| 4312 | 448 | AB010635 | N, J | carboxylesterase 2 (intestine, liver) | carboxylesterase 2 (intestine, liver) |
| 13973 | 449 | AB011679 | N, E | tubulin, beta 5 | tubulin, beta 5 |
| 1422 | 450 | AB012759 | M, B, G, L | prolyl endopeptidase | prolyl endopeptidase |
| 15926 | 451 | AB012933 | D | fatty acid Coenzyme A ligase, long chain 5 | fatty acid Coenzyme A ligase, long chain 5 |
| 20457 | 452 | AB012944 | M, B, K, L | parathyroid hormone receptor | parathyroid hormone receptor |
| 18300 | 453 | AB013453 | M, H, I, L | | Rattus norvegicus mRNA for NaPi-2 alpha, complete cds |
| 18075 | 454 | AB013455 | N | solute carrier family 34, member 1 | solute carrier family 34, member 1 |
| 18076 | 454 | AB013455 | N | solute carrier family 34, member 1 | solute carrier family 34, member 1 |
| 18597 | 455 | AB013732 | N, B, H | UDP-glucose dehydrogeanse | UDP-glucose dehydrogeanse |
| 2632 | 456 | AB016489 | A, D | jumping translocation breakpoint | jumping translocation breakpoint |
| 4234 | 457 | AB016536 | N, K | (argininosuccinate lyase, heterogeneous nuclear | (argininosuccinate lyase, heterogeneous nuclear ribonucleoprotein A/B) |
| | | | | ribonucleoprotein A/B) | |
| 23625 | 458 | AB017260 | N, D | solute carrier family 22, member 5 | solute carrier family 22, member 5 |
| 15242 | 459 | AB017912 | D | MAD homolog 2 (Drosophila) | MAD homolog 2 (Drosophila) |
| 15243 | 459 | AB017912 | N | MAD homolog 2 (Drosophila) | MAD homolog 2 (Drosophila) |
| 954 | 460 | AF000114 | B | contactin associated protein 1 | contactin associated protein 1 |
| 1727 | 461 | AF001417 | M | core promoter element binding protein | core promoter element binding protein |
| 18070 | 462 | AF003008 | M, N | max interacting protein 1 | max interacting protein 1 |
| 1511 | 463 | AF004017 | D | solute carrier family 4, member 4 | solute carrier family 4, member 4 |
| 7488 | 464 | AF007758 | N | synuclein, alpha | synuclein, alpha |
| 7489 | 464 | AF007758 | M, G, I, J, L | synuclein, alpha | synuclein, alpha |
| 1183 | 465 | AF013144 | N | MAP-kinase phosphatase (cpg21) | MAP-kinase phosphatase (cpg21) |
| 1081 | 466 | AF013145 | M, D | PDZ domain containing 1 | PDZ domain containing 1 |
| 19254 | 467 | AF014009 | H | peroxiredoxin 6 | peroxiredoxin 6 |
| 1597 | 468 | AF014503 | L | nuclear protein 1 | nuclear protein 1 |
| 18074 | 469 | AF015305 | K | solute carrier family 29, member 2 | solute carrier family 29, member 2 |
| 11483 | 470 | AF020618 | M, I | myeloid differentiation primary response gene 116 | myeloid differentiation primary response gene 116 |
| 18043 | 470 | AF020618 | F | myeloid differentiation primary response gene 116 | myeloid differentiation primary response gene 116 |
| 16407 | 471 | AF022247 | N | cubilin | cubilin |
| 19665 | 472 | AF022819 | D, L | putative potassium channel TWIK | putative potassium channel TWIK |
| 25165 | 473 | AF022952 | N | vascular endothelial growth factor B | vascular endothelial growth factor B |
| 23868 | 474 | AF023087 | M, L | early growth response 1 | early growth response 1 |
| 16116 | 475 | AF025670 | F | caspase 6 | caspase 6 |
| 25168 | 476 | AF030050 | A | replication factor C | replication factor C |
| 3454 | 477 | AF030091 | N, J | cyclin L | cyclin L |
| 15790 | 478 | AF032120 | E | regulator of G-protein signaling 19 interacting protein 1 | regulator of G-protein signaling 19 interacting protein 1 |
| 2439 | 479 | AF032668 | A, F | SEC15 homolog (S. cerevisiae) | SEC15 homolog (S. cerevisiae) |
| 23045 | 480 | AF034218 | N | hyaluronidase 2 | hyaluronidase 2 |
| 15800 | 481 | AF035822 | A | synaptosomal-associated protein, 29 kD | synaptosomal-associated protein, 29 kD |
| 1564 | 482 | AF035963 | E, G, K | kidney injury molecule 1 | kidney injury molecule 1 |
| 8426 | 483 | AF036335 | N, E, F | NonO/p54nrb homolog | NonO/p54nrb homolog |
| 17326 | 484 | AF036548 | N | Rgc32 protein | Rgc32 protein |
| 17327 | 484 | AF036548 | N | Rgc32 protein | Rgc32 protein |
| 15008 | 485 | AF038591 | E | cytoplasmic aminopeptidase P | cytoplasmic aminopeptidase P |
| 21491 | 486 | AF040954 | B | putative protein phosphatase 1 nuclear targeting | putative protein phosphatase 1 nuclear targeting subunit |
| | | | | subunit | |
| 22602 | 487 | AF044574 | M | 2-4-dienoyl-Coenzyme A reductase 2, peroxisomal | 2-4-dienoyl-Coenzyme A reductase 2, peroxisomal |
| 22603 | 487 | AF044574 | N | 2-4-dienoyl-Coenzyme A reductase 2, peroxisomal | 2-4-dienoyl-Coenzyme A reductase 2, peroxisomal |
| 20864 | 488 | AF045464 | N, B, J | aflatoxin B1 aldehyde reductase | aflatoxin B1 aldehyde reductase |
| 10241 | 489 | AF048687 | N, C, K | UDP-Gal: betaGlcNAc beta 1,4-galactosyltransferase, | UDP-Gal: betaGlcNAc beta 1,4-galactosyltransferase, polypeptide 6 |
| | | | | polypeptide 6 | |
| 117 | 490 | AF049239 | N | sodium channel, voltage-gated, type 8, alpha | sodium channel, voltage-gated, type 8, alpha polypeptide |
| | | | | polypeptide | |
| 16649 | 491 | AF051895 | M, N, E | annexin 5 | annexin 5 |
| 985 | 492 | AF053312 | N | small inducible cytokine subfamily A20 | small inducible cytokine subfamily A20 |
| 19058 | 493 | AF054618 | E | cortactin isoform B | cortactin isoform B |
| 11843 | 494 | AF054826 | A | vesicle-associated membrane protein 5 | vesicle-associated membrane protein 5 |
| 17324 | 495 | AF056031 | M | kynurenine 3-hydroxylase | kynurenine 3-hydroxylase |
| 4011 | 496 | AF056333 | N, J | cytochrome P450, subfamily 2E, polypeptide 1 | cytochrome P450, subfamily 2E, polypeptide 1 |
| 1104 | 497 | AF058714 | N | solute carrier family 13, member 2 | solute carrier family 13, member 2 |
| 4589 | 498 | AF062389 | M, N, D | kidney-specific protein (KS) | kidney-specific protein (KS) |
| 16006 | 499 | AF062594 | M | nucleosome assembly protein 1-like 1 | nucleosome assembly protein 1-like 1 |
| 16007 | 499 | AF062594 | N, E | nucleosome assembly protein 1-like 1 | nucleosome assembly protein 1-like 1 |
| 15761 | 500 | AF062741 | B | pyruvate dehydrogenase phosphatase isoenzyme 2 | pyruvate dehydrogenase phosphatase isoenzyme 2 |
| 4327 | 501 | AF063447 | M, G, I | nuclear RNA helicase, DECD variant of DEAD box | nuclear RNA helicase, DECD variant of DEAD box family |
| | | | | family | |
| 16444 | 502 | AF065438 | N | peptidylprolyl isomerase C-associated protein | peptidylprolyl isomerase C-associated protein |
| 16155 | 503 | AF068860 | N | defensin beta 1 | defensin beta 1 |
| 25198 | 504 | AF069782 | M, N, I, K | Nopp140 associated protein | Nopp140 associated protein |
| 17426 | 505 | AF073839 | C | dynein-associated protein RKM23 | dynein-associated protein RKM23 |
| 744 | 506 | AF076856 | M, N | espin | espin |
| 5496 | 507 | AF080468 | M, N, D, E | glucose-6-phosphatase, transport protein 1 | glucose-6-phosphatase, transport protein 1 |
| 5497 | 507 | AF080468 | M, N, D, E | glucose-6-phosphatase, transport protein 1 | glucose-6-phosphatase, transport protein 1 |
| 25204 | 508 | AF080507 | N | | |
| 10015 | 509 | AF083269 | M, G, K | actin related protein ⅔ complex, subunit 1B | actin related protein ⅔ complex, subunit 1B |
| 10016 | 509 | AF083269 | M, G | actin related protein ⅔ complex, subunit 1B | actin related protein ⅔ complex, subunit 1B |
| 20741 | 510 | AF084186 | A, J | alpha-spectrin 2 | alpha-spectrin 2 |
| 23679 | 511 | AF087037 | C, L | B-cell translocation gene 3 | B-cell translocation gene 3 |
| 15791 | 512 | AF089817 | C | regulator of G-protein signaling 19 interacting protein 1 | regulator of G-protein signaling 19 interacting protein 1 |
| 17535 | 513 | AF090306 | N, E | retinoblastoma binding protein 7 | retinoblastoma binding protein 7 |
| 16156 | 514 | AF093536 | N | defensin beta 1 | defensin beta 1 |
| 4723 | 515 | AF093773 | N | malate dehydrogenase 1 | malate dehydrogenase 1 |
| 2367 | 516 | AF095741 | N | Mg87 protein | Mg87 protein |
| 2368 | 516 | AF095741 | N, K | Mg87 protein | Mg87 protein |
| 6554 | 517 | AF097723 | N | plasma glutamate carboxypeptidase | plasma glutamate carboxypeptidase |
| 15232 | 518 | AI007622 | D | | Rattus norvegicus transcribed sequences |
| 24109 | 519 | AI007725 | J | | Rattus norvegicus transcribed sequences |
| 15848 | 520 | AI007820 | N | | Rattus norvegicus heat shock protein 90 beta mRNA, partial sequence |
| 1804 | 521 | AI007824 | L | | |
| 6804 | 522 | AI007877 | M | | Rattus norvegicus transcribed sequences |
| 15849 | 523 | AI008074 | N | | Rattus norvegicus heat shock protein 90 beta mRNA, partial sequence |
| 16394 | 524 | AI008106 | K | calcium binding protein A6 (calcyclin) | calcium binding protein A6 (calcyclin) |
| 3121 | 525 | AI008160 | M, G, K | | Rattus norvegicus transcribed sequence with moderate similarity to protein |
| | | | | | pir: T44603 (H. sapiens) T44603 hypothetical protein CGI-83 [imported]- |
| | | | | | human |
| 11162 | 526 | AI008183 | C | solute carrier family 29 (nucleoside transporters), | solute carrier family 29 (nucleoside transporters), member 3 |
| | | | | member 3 | |
| 23917 | 527 | AI008441 | H, I | | Rattus norvegicus transcribed sequence with strong similarity to protein |
| | | | | | sp: P52209 (H. sapiens) 6PGD_HUMAN 6-phosphogluconate dehydrogenase, |
| | | | | | decarboxylating |
| 22599 | 528 | AI008458 | M | | Rattus norvegicus transcribed sequences |
| 22698 | 529 | AI008578 | L | | Rattus norvegicus transcribed sequences |
| 19268 | 530 | AI008641 | D | ribosomal protein L22 | ribosomal protein L22 |
| 15434 | 531 | AI008836 | N | high mobility group box 2 | high mobility group box 2 |
| 410 | 532 | AI008974 | M, E | low density lipoprotein receptor-related protein | low density lipoprotein receptor-related protein associated protein 1 |
| | | | | associated protein 1 | |
| 21632 | 533 | AI009167 | M, H, I | | Rattus norvegicus transcribed sequence with strong similarity to protein |
| | | | | | sp: O95816 (H. sapiens) BAG2_HUMAN BAG-family molecular chaperone |
| | | | | | regulator-2 |
| 6382 | 534 | AI009362 | M | | Rattus norvegicus transcribed sequence with strong similarity to protein |
| | | | | | sp: P05423 (H. sapiens) BN51_HUMAN BN51 protein |
| 15097 | 535 | AI009405 | N | insulin-like growth factor binding protein 3 | insulin-like growth factor binding protein 3 |
| 10532 | 536 | AI009602 | K | | Rattus norvegicus transcribed sequences |
| 23362 | 537 | AI009605 | N | Ras homolog enriched in brain | Ras homolog enriched in brain |
| 895 | 538 | AI009614 | E | | Rattus norvegicus transcribed sequences |
| 19358 | 539 | AI009675 | J | | Rattus norvegicus transcribed sequences |
| 6833 | 540 | AI009687 | L | | Rattus norvegicus transcribed sequences |
| 15089 | 541 | AI009752 | M, K | | Rattus norvegicus transcribed sequences |
| 6842 | 542 | AI009764 | K | | Rattus norvegicus transcribed sequence with strong similarity to protein |
| | | | | | ref: NP_109630.1 (M. musculus) mesoderm development candidate 1 [Mus |
| | | | | | musculus] |
| 15138 | 543 | AI009801 | C | macrophage migration inhibitory factor | macrophage migration inhibitory factor |
| 17473 | 544 | AI009806 | M, N, K | dynein, cytoplasmic, light chain 1 | dynein, cytoplasmic, light chain 1 |
| 22619 | 545 | AI009825 | L | | Rattus norvegicus transcribed sequences |
| 26133 | 546 | AI009950 | F | | |
| 6869 | 547 | AI010025 | D | | Rattus norvegicus transcribed sequence |
| 16824 | 548 | AI010027 | D | | Rattus norvegicus transcribed sequences |
| 21105 | 549 | AI010067 | M, F | | Rattus norvegicus transcribed sequence with strong similarity to protein |
| | | | | | ref: NP_057032.1 (H. sapiens) CGI-19 protein [Homo sapiens] |
| 12716 | 550 | AI010178 | M | | Rattus norvegicus transcribed sequences |
| 2912 | 551 | AI010220 | M, A, F | | Rattus norvegicus transcribed sequence with weak similarity to protein |
| | | | | | sp: Q9Z1L1 (R. norvegicus) CLD7_RAT CLAUDIN-7 |
| 13104 | 552 | AI010224 | D | adducin 3, gamma | adducin 3, gamma |
| 17938 | 553 | AI010332 | C | | Rattus norvegicus transcribed sequences |
| 12095 | 554 | AI010339 | D | | Rattus norvegicus transcribed sequence with weak similarity to protein |
| | | | | | ref: NP_077128.2 (M. musculus) ethanol induced 6 [Mus musculus] |
| 6916 | 555 | AI010430 | M | | Rattus norvegicus transcribed sequences |
| 18657 | 556 | AI010435 | K | | Rattus norvegicus transcribed sequences |
| 16521 | 557 | AI010470 | B, J, L | ceruloplasmin | ceruloplasmin |
| 6927 | 558 | AI010542 | M | | Rattus norvegicus transcribed sequences |
| 17524 | 559 | AI010568 | M, A, I | growth hormone receptor | growth hormone receptor |
| 21659 | 560 | AI010584 | D | interferon induced transmembrane protein 3-like | interferon induced transmembrane protein 3-like |
| 23509 | 561 | AI010962 | A | | Rattus norvegicus transcribed sequence with weak similarity to protein |
| | | | | | ref: NP_445863.1 (R. norvegicus) sorting nexin 1 [Rattus norvegicus] |
| 15679 | 562 | AI011058 | B, L | | Rattus norvegicus transcribed sequences |
| 3934 | 563 | AI011510 | D | | Rattus norvegicus transcribed sequences |
| 3941 | 564 | AI011598 | M, J | | Rattus norvegicus transcribed sequence with moderate similarity to protein |
| | | | | | sp: Q61001 (M. musculus) LMA5_MOUSE Laminin alpha-5 chain precursor |
| 17550 | 565 | AI011607 | M, I | trimethyllysine hydroxylase, epsilon | trimethyllysine hydroxylase, epsilon |
| 3995 | 566 | AI011678 | M, I, K | syndecan 2 | syndecan 2 |
| 20804 | 567 | AI011684 | H | transketolase | transketolase |
| 14267 | 568 | AI011738 | A | | Rattus norvegicus transcribed sequence with strong similarity to protein |
| | | | | | sp: P38718 (R. norvegicus) P044_RAT 0-44 protein |
| 21060 | 569 | AI011746 | A | | Rattus norvegicus transcribed sequence with strong similarity to protein |
| | | | | | ref: NP_114131.1 (H. sapiens) transmembrane protein induced by tumor |
| | | | | | necrosis factor alpha [Homo sapiens] |
| 15616 | 570 | AI011998 | N | dnaJ homolog, subfamily b, member 9 | dnaJ homolog, subfamily b, member 9 |
| 13151 | 571 | AI012030 | M | matrix Gla protein | matrix Gla protein |
| 6518 | 572 | AI012114 | M | | Rattus norvegicus transcribed sequence with moderate similarity to protein |
| | | | | | sp: Q9NXH9 (H. sapiens) TRM1_HUMAN Probable N(2),N(2)- |
| | | | | | dimethylguanosine tRNA methyltransferase (tRNA(guanine-26, N(2)-N(2)) |
| | | | | | methyltransferase) (tRNA 2,2-dimethylguanosine-26 methyltransferase) |
| | | | | | (tRNA(m(2,2)G26)dimethyltransferase) |
| 17832 | 573 | AI012182 | J | hemoglobin beta chain complex | hemoglobin beta chain complex |
| 21796 | 574 | AI012221 | M, K | Seminal vesicle protein, secretion 2 | Seminal vesicle protein, secretion 2 |
| 23946 | 575 | AI012240 | M | | Rattus norvegicus transcribed sequences |
| 13633 | 576 | AI012335 | M | activating transcription factor ATF-4 | activating transcription factor ATF-4 |
| 2250 | 577 | AI012354 | M | histone 2b | histone 2b |
| 24200 | 578 | AI012356 | M, B, L | | Rattus norvegicus transcribed sequences |
| 7471 | 579 | AI012379 | L | | Rattus norvegicus transcribed sequences |
| 9116 | 580 | AI012457 | A, C | | Rattus norvegicus transcribed sequence with strong similarity to protein |
| | | | | | ref: NP_006336.2 (H. sapiens) chromosome 4 open reading frame 1; |
| | | | | | expressed in human embryonic lung [Homo sapiens] |
| 7127 | 581 | AI012464 | M | | Rattus norvegicus transcribed sequences |
| 20817 | 582 | AI012589 | M, N | (glutathione S-transferase, pi 2, glutathione-S- | (glutathione S-transferase, pi 2, glutathione-S-transferase, pi 1) |
| | | | | transferase, pi 1) | |
| 3493 | 583 | AI012590 | D, K | | Rattus norvegicus transcribed sequences |
| 3961 | 584 | AI012598 | A | | Rattus norvegicus transcribed sequence with strong similarity to protein |
| | | | | | ref: NP_032333.1 (M. musculus) Hpall tiny fragments locus 9c [Mus musculus] |
| 18713 | 585 | AI012604 | N, L | eukaryotic initiation factor 5 (elF-5) | eukaryotic initiation factor 5 (elF-5) |
| 2242 | 586 | AI012635 | M, H, I, J | flavin-containing monooxygenase 3 | flavin-containing monooxygenase 3 |
| 7142 | 587 | AI012689 | C | | Rattus norvegicus transcribed sequences |
| 23810 | 588 | AI012781 | E | | Rattus norvegicus transcribed sequence with strong similarity to protein |
| | | | | | sp: Q61188 (M. musculus) EZH2_MOUSE Enhancer of zeste homolog 2 (ENX- |
| | | | | | 1) |
| 1409 | 589 | AI012802 | M, A, C, E, F | Hydroxyacyl glutathione hydrolase | Hydroxyacyl glutathione hydrolase |
| 20086 | 590 | AI013260 | M, H | lamin A | lamin A |
| 21302 | 591 | AI013297 | J | | Rattus norvegicus transcribed sequence with strong similarity to protein |
| | | | | | ref: NP_035017.1 (M. musculus) NADH dehydrogenase (ubiquinone) Fe—S |
| | | | | | protein 4; NADH dehydrogenase (ubiquinone) Fe—S protein 4 (18 kDa) [Mus |
| | | | | | musculus] |
| 6758 | 592 | AI013394 | B, L | heparan sulfate (glucosamine) 3-O-sulfotransferase 1 | heparan sulfate (glucosamine) 3-O-sulfotransferase 1 |
| 7270 | 593 | AI013564 | D | | Rattus norvegicus Ab2-416 mRNA, complete cds |
| 6674 | 594 | AI013568 | I | | Rattus norvegicus transcribed sequences |
| 15159 | 595 | AI013697 | D | | Rattus norvegicus transcribed sequence with strong similarity to protein |
| | | | | | ref: NP_075918.1 (M. musculus) RIKEN cDNA 6030432N09 [Mus musculus] |
| 7278 | 596 | AI013738 | J | | Rattus norvegicus transcribed sequences |
| 22592 | 597 | AI013740 | M, G, K | | Rattus norvegicus transcribed sequence with strong similarity to protein |
| | | | | | ref: NP_062729.1 (M. musculus) proteolipid protein 2 [Mus musculus] |
| 15928 | 598 | AI013829 | M, K | | Rattus norvegicus transcribed sequence with strong similarity to protein |
| | | | | | ref: NP_031947.1 (M. musculus) E74-like factor 3 [Mus musculus] |
| 21950 | 599 | AI013861 | N, G | 3-hydroxyisobutyrate dehydrogenase | 3-hydroxyisobutyrate dehydrogenase |
| 21391 | 600 | AI013902 | M, K | annexin A7 | annexin A7 |
| 7299 | 601 | AI013911 | M, A, B, L | RNA binding motif protein 3 | RNA binding motif protein 3 |
| 15904 | 602 | AI013971 | F | neurofascin | neurofascin |
| 815 | 603 | AI014087 | N | ribosomal protein S26 | ribosomal protein S26 |
| 17908 | 604 | AI014163 | M | interferon-related developmental regulator 1 | interferon-related developmental regulator 1 |
| 7216 | 605 | AI014165 | A | | Rattus norvegicus transcribed sequences |
| 15247 | 606 | AI014169 | N | upregulated by 1,25-dihydroxyvitamin D-3 | upregulated by 1,25-dihydroxyvitamin D-3 |
| 11326 | 607 | AI029015 | F | | Rattus norvegicus transcribed sequences |
| 22502 | 608 | AI029017 | H | putative zinc finger protein SERZ-1 | putative zinc finger protein SERZ-1 |
| 12812 | 609 | AI029126 | M, H | | Rattus norvegicus transcribed sequences |
| 3874 | 610 | AI029428 | M, I | | Rattus norvegicus transcribed sequence with strong similarity to protein |
| | | | | | pir: S50082 (H. sapiens) S50082 nuclear cap binding protein - human |
| 7451 | 611 | AI029450 | L | | Rattus norvegicus transcribed sequence with moderate similarity to protein |
| | | | | | sp: P07814 (H. sapiens) SYEP_HUMAN Bifunctional aminoacyl-tRNA |
| | | | | | synthetase [Includes: Glutamyl-tRNA synthetase (Glutamate-tRNA ligase); |
| | | | | | Prolyl-tRNA synthetase (Proline-tRNA ligase)] |
| 22415 | 612 | AI029795 | C | growth response protein (CL-6) | growth response protein (CL-6) |
| 7537 | 613 | AI029829 | M | | Rattus norvegicus transcribed sequences |
| 24893 | 614 | AI029920 | B | insulin-like growth factor-binding protein 5 | insulin-like growth factor-binding protein 5 |
| 7586 | 615 | AI030024 | C | | Rattus norvegicus transcribed sequences |
| 2370 | 616 | AI030179 | M, I | | Rattus norvegicus transcribed sequence with weak similarity to protein |
| | | | | | ref: NP_446030.1 (R. norvegicus) vacuolar proton-ATPase subunit M9.2 |
| | | | | | [Rattus norvegicus] |
| 7634 | 617 | AI030248 | A | | Rattus norvegicus transcribed sequence with strong similarity to protein |
| | | | | | ref: NP_444391.1 (M. musculus) mitochondrial ribosomal protein L27 [Mus |
| | | | | | musculus] |
| 665 | 618 | AI030430 | B | | Rattus norvegicus transcribed sequences |
| 7681 | 619 | AI030449 | J | | Rattus norvegicus transcribed sequence with strong similarity to protein |
| | | | | | ref: NP_034922.1 (M. musculus) methyltransferase-like 1 (S. cerevisiae) [Mus |
| | | | | | musculus] |
| 11559 | 620 | AI030472 | C | | Rattus norvegicus transcribed sequence with strong similarity to protein |
| | | | | | ref: NP_079615.1 (M. musculus) RIKEN cDNA 0610027O18 [Mus musculus] |
| 17419 | 621 | AI030524 | D | | Rattus norvegicus transcribed sequence with strong similarity to protein |
| | | | | | pir: JC5223 (M. musculus) JC5223 histidine - tRNA ligase (EC 6.1.1.21) - |
| | | | | | mouse |
| 7665 | 622 | AI030668 | E | nucleosome assembly protein 1-like 1 | nucleosome assembly protein 1-like 1 |
| 16169 | 623 | AI030932 | J | | Rattus norvegicus transcribed sequence with weak similarity to protein |
| | | | | | sp: P43884 (R. norvegicus) PLIN_RAT Perilipin (PERI) (Lipid droplet- |
| | | | | | associated protein) |
| 7825 | 624 | AI031023 | F | | Rattus norvegicus transcribed sequence with strong similarity to protein |
| | | | | | pdb: 1BGM (E. coli) O Chain O, Beta-Galactosidase (Chains I-P) |
| 14856 | 625 | AI043721 | A | | Rattus norvegicus transcribed sequence with strong similarity to protein |
| | | | | | pdb: 1BGM (E. coli) O Chain O, Beta-Galactosidase (Chains I-P) |
| 7896 | 626 | AI043772 | D | | Rattus norvegicus transcribed sequences |
| 7903 | 627 | AI043805 | M | | Rattus norvegicus transcribed sequences |
| 10818 | 628 | AI043990 | M, I | | Rattus norvegicus transcribed sequences |
| 7964 | 629 | AI044046 | G | | Rattus norvegicus transcribed sequences |
| 5430 | 630 | AI044253 | F | | Rattus norvegicus transcribed sequences |
| 5461 | 631 | AI044338 | M, B | | Rattus norvegicus transcribed sequence with weak similarity to protein |
| | | | | | pir: S19586 (R. norvegicus) S19586 N-methyl-D-aspartate receptor glutamate- |
| | | | | | binding chain - rat |
| 1431 | 632 | AI044610 | D | dopa decarboxylase | dopa decarboxylase |
| 2348 | 633 | AI044794 | M, D | | Rattus norvegicus transcribed sequence with strong similarity to protein |
| | | | | | prf: 2208451B (M. musculus) 2208451B syntrophin [Mus musculus] |
| 20983 | 634 | AI044900 | K | fatty acid Coenzyme A ligase, long chain 2 | fatty acid Coenzyme A ligase, long chain 2 |
| 21682 | 635 | AI045030 | N | CCAAT/enhancerbinding, protein (C/EBP) delta | CCAAT/enhancerbinding, protein (C/EBP) delta |
| 19235 | 636 | AI045074 | M | | Rattus norvegicus transcribed sequence with moderate similarity to protein |
| | | | | | pir: A37086 (M. musculus) A37086 beta-galactosidase (EC 3.2.1.23) precursor - |
| | | | | | mouse |
| 5711 | 637 | AI045151 | M | | Rattus norvegicus transcribed sequence with weak similarity to protein |
| | | | | | ref: NP_446417.1 (R. norvegicus) solute carrier family 25 |
| | | | | | (carnitine/acylcarnitine translocase), member 20 [Rattus norvegicus] |
| 5474 | 638 | AI045477 | M | | Rattus norvegicus transcribed sequences |
| 10004 | 639 | AI045509 | C | | Rattus norvegicus transcribed sequences |
| 17755 | 640 | AI045608 | C, I | | Rattus norvegicus transcribed sequence with moderate similarity to protein |
| | | | | | pir: I60307 (E. coli) I60307 beta-galactosidase, alpha peptide - Escherichia coli |
| 26173 | 641 | AI045626 | F | | |
| 5855 | 642 | AI045669 | M | | Rattus norvegicus transcribed sequences |
| 23712 | 643 | AI045827 | L | | Rattus norvegicus transcribed sequence with weak similarity to protein |
| | | | | | pir: T00043 (M. musculus) T00043 BH-protocadherin-a - mouse |
| 5900 | 644 | AI045866 | I | | Rattus norvegicus transcribed sequence |
| 7540 | 645 | AI045882 | M, B, L | vitamin A-deficient testicular protein 5 | vitamin A-deficient testicular protein 5 |
| 5329 | 646 | AI045970 | M | amphiphysin | amphiphysin |
| 10069 | 647 | AI058503 | F | | Rattus norvegicus transcribed sequence with moderate similarity to protein |
| | | | | | sp: Q92537 (H. sapiens) Y247_HUMAN Hypothetical protein KIAA0247 |
| 8065 | 648 | AI058509 | B, L | | Rattus norvegicus transcribed sequence |
| 8104 | 649 | AI058655 | B | | |
| 8143 | 650 | AI058759 | M | | Rattus norvegicus transcribed sequences |
| 4789 | 651 | AI058889 | M | | Rattus norvegicus transcribed sequence with strong similarity to protein |
| | | | | | pdb: 1BGM (E. coli) O Chain O, Beta-Galactosidase (Chains I-P) |
| 8188 | 652 | AI058943 | M | erythrocyte protein band 4.1-like 3 | erythrocyte protein band 4.1-like 3 |
| 8202 | 653 | AI058990 | L | | Rattus norvegicus transcribed sequence with moderate similarity to protein |
| | | | | | ref: NP_055702.1 (H. sapiens) hypothetical protein from BCRA2 region [Homo |
| | | | | | sapiens] |
| 8283 | 654 | AI059290 | H | | Rattus norvegicus transcribed sequences |
| 20802 | 655 | AI059508 | N, H | transketolase | transketolase |
| 3083 | 656 | AI060150 | E | | Rattus norvegicus transcribed sequence with moderate similarity to protein |
| | | | | | ref: NP_003600.1 (H. sapiens) HIRA-interacting protein 3 [Homo sapiens] |
| 9067 | 657 | AI070087 | M | prolactin | prolactin |
| 6343 | 658 | AI070108 | A | | Rattus norvegicus transcribed sequence with moderate similarity to protein |
| | | | | | ref: NP_444504.1 (H. sapiens) FKBP-associated protein isoform FAP68; |
| | | | | | FK506-binding protein-associated protein [Homo sapiens] |
| 8820 | 659 | AI070152 | B, H, L | Smhs1 protein | Smhs1 protein |
| 26183 | 660 | AI070204 | A | | Rattus norvegicus transcribed sequences |
| 352 | 661 | AI070295 | H | growth arrest and DNA-damage-inducible 45 alpha | growth arrest and DNA-damage-inducible 45 alpha |
| 24197 | 662 | AI070314 | B, L | | Rattus norvegicus transcribed sequence with strong similarity to protein |
| | | | | | pdb: 1BGM (E. coli) O Chain O, Beta-Galactosidase (Chains I-P) |
| 14424 | 663 | AI070421 | M | | Rattus norvegicus transcribed sequences |
| 10434 | 664 | AI070497 | B | | Rattus norvegicus transcribed sequences |
| 8927 | 665 | AI070523 | A | | Rattus norvegicus transcribed sequence with strong similarity to protein |
| | | | | | ref: NP_079737.1 (M. musculus) RIKEN cDNA 1810020G14 [Mus musculus] |
| 19031 | 666 | AI070532 | M, L | T-cell death associated gene | T-cell death associated gene |
| 8944 | 667 | AI070597 | F | | Rattus norvegicus transcribed sequence with strong similarity to protein |
| | | | | | sp: Q9Y3A5 (H. sapiens) YC97_HUMAN Hypothetical protein CGI-97 |
| 8946 | 668 | AI070611 | A | | Rattus norvegicus transcribed sequences |
| 10446 | 669 | AI070638 | B | | Rattus norvegicus transcribed sequence with moderate similarity to protein |
| | | | | | ref: NP_067053.1 (H. sapiens) myeloid/lymphoid or mixed-lineage leukemia 3; |
| | | | | | ALR-like protein [Homo sapiens] |
| 8739 | 670 | AI070859 | D | | Rattus norvegicus transcribed sequence with strong similarity to protein |
| | | | | | ref: NP_080044.1 (M. musculus) GH regulated TBC protein 1 [Mus musculus] |
| 9026 | 671 | AI070944 | L | | Rattus norvegicus transcribed sequences |
| 8721 | 672 | AI071024 | M, A, D, I | | Rattus norvegicus transcribed sequence |
| 9212 | 673 | AI071098 | K | tropomyosin isoform 6 | tropomyosin isoform 6 |
| 18792 | 674 | AI071177 | M, I | | Rattus norvegicus transcribed sequences |
| 9583 | 675 | AI071185 | M, C, L | | Rattus norvegicus transcribed sequences |
| 9079 | 676 | AI071251 | B, I | | Rattus norvegicus transcribed sequence with strong similarity to protein |
| | | | | | pir: A57050 (M. musculus) A57050 K-glypican precursor - mouse |
| 11057 | 677 | AI071509 | L | | Rattus norvegicus transcribed sequences |
| 22929 | 678 | AI071578 | M, F | neuronal regeneration related protein | neuronal regeneration related protein |
| 22930 | 678 | AI071578 | M | neuronal regeneration related protein | neuronal regeneration related protein |
| 9673 | 679 | AI071581 | M, I | | Rattus norvegicus transcribed sequences |
| 8099 | 680 | AI071586 | B | | Rattus norvegicus transcribed sequence with moderate similarity to protein |
| | | | | | ref: NP_071364.1 (H. sapiens) hypothetical protein bK1048E9.5 [Homo |
| | | | | | sapiens] |
| 11075 | 681 | AI071639 | F | | Rattus norvegicus transcribed sequence |
| 9699 | 682 | AI071646 | M | | Rattus norvegicus transcribed sequences |
| 9781 | 683 | AI071943 | M, I | | Rattus norvegicus transcribed sequences |
| 8665 | 684 | AI071965 | C | | R. norvegicus hsp70.2 mRNA for heat shock protein 70 |
| 12846 | 685 | AI072068 | J | | Rattus norvegicus transcribed sequence with moderate similarity to protein |
| | | | | | pir: I60307 (E. coli) I60307 beta-galactosidase, alpha peptide - Escherichia coli |
| 9191 | 686 | AI072107 | A | | |
| 10849 | 687 | AI072189 | F | | Rattus norvegicus transcnbed sequences |
| 20003 | 688 | AI072362 | M | | Rattus norvegicus transcribed sequences |
| 21797 | 689 | AI072439 | G, K | Seminal vesicle protein, secretion 2 | Seminal vesicle protein, secretion 2 |
| 1501 | 690 | AI072634 | M, C, G, K | keratin complex 1, acidic, gene 18 | keratin complex 1, acidic, gene 18 |
| 9176 | 691 | AI072675 | A | dystonia 1, torsion (autosomal dominant; torsin A) | dystonia 1, torsion (autosomal dominant; torsin A) |
| 16813 | 692 | AI072746 | I | | |
| 19930 | 693 | AI072799 | F | | Rattus norvegicus transcribed sequence |
| 21885 | 694 | AI072886 | M | | Rattus norvegicus transcribed sequences |
| 9439 | 695 | AI072934 | J | | Rattus norvegicus transcribed sequences |
| 9468 | 696 | AI073021 | M | | Rattus norvegicus transcribed sequences |
| 24165 | 697 | AI101113 | F | | Rattus norvegicus transcribed sequences |
| 6321 | 698 | AI101256 | M | | Rattus norvegicus transcribed sequence with weak similarity to protein |
| | | | | | sp: Q9JJ54 (R. norvegicus) ROD_RAT Heterogeneous nuclear |
| | | | | | ribonucleoprotein D0 (hnRNP D0) (AU-rich element RNA-binding protein 1) |
| 17743 | 699 | AI101660 | J | | Rattus norvegicus transcribed sequences |
| 4119 | 700 | AI101901 | L | | Rattus norvegicus transcribed sequence with strong similarity to protein |
| | | | | | ref: NP_032404.1 (M. musculus) imprinted and ancient [Mus musculus] |
| 2824 | 701 | AI101999 | C | | Rattus norvegicus transcribed sequences |
| 18642 | 702 | AI102023 | C | | Rattus norvegicus transcribed sequence with strong similarity to protein |
| | | | | | sp: Q9QY73 (M. musculus) C1O8_MOUSE Protein C1orf8 homolog precursor |
| | | | | | (Thymic dendritic cell-derived factor 1) |
| 11953 | 703 | AI102505 | A | cytochrome c oxidase, subunit VIIIa | cytochrome c oxidase, subunit VIIIa |
| 2125 | 704 | AI102519 | G | | Rattus norvegicus transcribed sequence with strong similarity to protein |
| | | | | | ref: NP_035792.1 (M. musculus) TYRO protein tyrosine kinase binding protein; |
| | | | | | killer cell activating receptor associated protein [Mus musculus] |
| 15190 | 705 | AI102562 | M, N | Metallothionein | Metallothionein |
| 19011 | 706 | AI102618 | L | | Rattus norvegicus transcribed sequences |
| 23837 | 707 | AI102620 | M, N | | Rattus norvegicus transcribed sequences |
| 23538 | 708 | AI102727 | M | solute carrier family 20 (phosphate transporter), | solute carrier family 20 (phosphate transporter), member 1 |
| | | | | member 1 | |
| 17234 | 709 | AI102741 | J | Tissue inhibitor of metalloproteinase 3 | Tissue inhibitor of metalloproteinase 3 |
| 17850 | 710 | AI102750 | H | | Rattus norvegicus transcribed sequence with weak similarity to protein |
| | | | | | pir: JQ0866 (R. norvegicus) JQ0866 T-complex protein 1 - rat |
| 6796 | 711 | AI102753 | M, B | ring finger protein 4 | ring finger protein 4 |
| 4449 | 712 | AI102838 | N, B, G, K | Isovaleryl Coenzyme A dehydrogenase | Isovaleryl Coenzyme A dehydrogenase |
| 8837 | 713 | AI102849 | C | general transcription factor II I | general transcription factor II I |
| 15861 | 714 | AI102868 | N | | Rattus norvegicus phosphoserine aminotransferase mRNA, complete cds |
| 16918 | 715 | AI103074 | N | ribosomal protein S12 | ribosomal protein S12 |
| 3584 | 716 | AI103106 | E | lamin B1 | lamin B1 |
| 3279 | 717 | AI103224 | F | carbonyl reductase | carbonyl reductase |
| 13028 | 718 | AI103253 | A | | Rattus norvegicus transcribed sequences |
| 1807 | 719 | AI103365 | L | | Rattus norvegicus transcribed sequences |
| 7622 | 720 | AI103472 | A | | Rattus norvegicus transcribed sequence with moderate similarity to protein |
| | | | | | pdb: 1LBG (E. coli) B Chain B, Lactose Operon Repressor Bound To 21-Base |
| | | | | | Pair Symmetric Operator Dna, Alpha Carbons Only |
| 20918 | 721 | AI103552 | J | | Rattus norvegicus transcribed sequences |
| 4856 | 722 | AI103708 | G | | Rattus norvegicus transcribed sequences |
| 16884 | 723 | AI103758 | E | aldehyde dehydrogenase family 9, subfamily A1 | aldehyde dehydrogenase family 9, subfamily A1 |
| 1649 | 724 | AI103782 | F | Peptidylglycine alpha-amidating monooxygenase | Peptidylglycine alpha-amidating monooxygenase |
| 22885 | 725 | AI103828 | M, B | | Rattus norvegicus transcribed sequence with strong similarity to protein |
| | | | | | ref: NP_079514.1 (H. sapiens) BTB (POZ) domain containing 1 [Homo |
| | | | | | sapiens] |
| 15050 | 726 | AI103911 | I | | Rattus norvegicus transcribed sequence with strong similarity to protein |
| | | | | | pir: A32296 (R. norvegicus) A32296 ubiquinol-cytochrome-c reductase (EC |
| | | | | | 1.10.2.2) Rieske iron-sulfur protein precursor - rat (fragment) |
| 7128 | 727 | AI103937 | M | | Rattus norvegicus transcribed sequences |
| 22271 | 728 | AI103947 | F | | Rattus norvegicus transcribed sequence with moderate similarity to protein |
| | | | | | ref: NP_444393.1 (M. musculus) mitochondrial ribosomal protein L36 [Mus |
| | | | | | musculus] |
| 12450 | 729 | AI103955 | C | LRP16 protein | LRP16 protein |
| 19991 | 730 | AI103956 | K | mitochondrial aconitase (nuclear aco2 gene) | mitochondrial aconitase (nuclear aco2 gene) |
| 20833 | 731 | AI104035 | N, A | | Rattus norvegicus transcribed sequence with strong similarity to protein |
| | | | | | ref: NP_079904.1 (M. musculus) RIKEN cDNA 2010000G05 [Mus musculus] |
| 22101 | 732 | AI104251 | M, C, I | | Rattus norvegicus transcribed sequence with moderate similarity to protein |
| | | | | | ref: NP_056222.1 (H. sapiens) DKFZP564O243 protein [Homo sapiens] |
| 4235 | 733 | AI104524 | M, H, K, L | heterogeneous nuclear ribonucleoprotein A/B | heterogeneous nuclear ribonucleoprotein A/B |
| 18509 | 734 | AI104528 | A | | Rattus norvegicus DD6C4-4 mRNA, partial sequence |
| 12798 | 735 | AI104773 | M | | Rattus norvegicus transcribed sequence with strong similarity to protein |
| | | | | | ref: NP_079411.1 (H. sapiens) hypothetical protein KIAA1695; hypothetical |
| | | | | | protein FLJ22297; KIAA1695 protein [Homo sapiens] |
| 11232 | 736 | AI104864 | F | | Rattus norvegicus transcribed sequence with strong similarity to protein |
| | | | | | ref: NP_076952.1 (H. sapiens) hypothetical protein MGC3037 [Homo sapiens] |
| 16887 | 737 | AI104883 | F | | Rattus norvegicus transcribed sequence with strong similarity to protein |
| | | | | | ref: NP_080841.1 (M. musculus) RIKEN cDNA 9430083G14 [Mus musculus] |
| 21253 | 738 | AI105110 | F | | Rattus norvegicus transcribed sequence with strong similarity to protein |
| | | | | | sp: P48024 (M. musculus) SUI1_MOUSE Protein translation factor SUI1 |
| | | | | | homolog |
| 16885 | 739 | AI105188 | K | aldehyde dehydrogenase family 9, subfamily A1 | aldehyde dehydrogenase family 9, subfamily A1 |
| 18077 | 740 | AI105198 | N | solute carrier family 34, member 1 | solute carrier family 34, member 1 |
| 5199 | 741 | AI105272 | M, G | | Rattus norvegicus transcribed sequence with strong similarity to protein |
| | | | | | ref: NP_076133.1 (M. musculus) methylcrotonoyl-Coenzyme A carboxylase 1 |
| | | | | | (alpha) [Mus musculus] |
| 15364 | 742 | AI105348 | J | cofilin 1 | cofilin 1 |
| 7049 | 743 | AI105371 | C | | Rattus norvegicus transcribed sequences |
| 7700 | 744 | AI105383 | M, D | sphingosine kinase 1 | sphingosine kinase 1 |
| 13343 | 745 | AI105398 | M | | Rattus norvegicus transcribed sequences |
| 17221 | 746 | AI105429 | K | | Rattus norvegicus transcribed sequence with moderate similarity to protein |
| | | | | | pdb: 1LBG (E. coli) B Chain B, Lactose Operon Repressor Bound To 21-Base |
| | | | | | Pair Symmetric Operator Dna, Alpha Carbons Only |
| 23660 | 747 | AI105448 | N | hydroxysteroid 11-beta dehydrogenase 1 | hydroxysteroid 11-beta dehydrogenase 1 |
| 15291 | 748 | AI111401 | D | muliple inositol polyphosphate histidine phosphatase 1 | mutiple inositol polyphosphate histidine phosphatase 1 |
| 16718 | 749 | AI111537 | H | | Rattus norvegicus Class II MHC RT1.D(a) beta chain precursor (RT1.D(a)) |
| | | | | | mRNA, complete cds |
| 4479 | 750 | AI111599 | M | growth arrest specific 5 | growth arrest specific 5 |
| 24211 | 751 | AI111853 | G | | Rattus norvegicus transcribed sequence with strong similarity to protein |
| | | | | | sp: P06351 (M. musculus) H33_HUMAN Histone H3.3 (H3.A) (H3.B) (H3.3Q) |
| 12925 | 752 | AI111970 | B | | Rattus norvegicus transcribed sequence with moderate similarity to protein |
| | | | | | pir: I60307 (E. coli) I60307 beta-galactosidase, alpha peptide - Escherichia coli |
| 9017 | 753 | AI112138 | M | | Rattus norvegicus transcribed sequences |
| 11198 | 754 | AI112199 | F | | Rattus norvegicus transcribed sequences |
| 12945 | 755 | AI112212 | F | | Rattus norvegicus transcribed sequence with weak similarity to protein |
| | | | | | ref: NP_071348.1 (H. sapiens) hypothetical protein FLJ21877; death receptor- |
| | | | | | interacting protein [Homo sapiens] |
| 20919 | 756 | AI112516 | N | zinc finger protein 36, C3H type-like 1 | zinc finger protein 36, C3H type-like 1 |
| 3713 | 757 | AI112571 | M, J | | Rattus norvegicus transcribed sequence with strong similarity to protein |
| | | | | | ref: NP_112595.1 (H. sapiens) hypothetical protein DKFZp564B1162 [Homo |
| | | | | | sapiens] |
| 15538 | 758 | AI112633 | L | proteasome (prosome, macropain) subunit, alpha type 6 | proteasome (prosome, macropain) subunit, alpha type 6 |
| 12921 | 759 | AI112636 | M, B, L | | Rattus norvegicus transcribed sequence with strong similarity to protein |
| | | | | | pir: A57501 (M. musculus) A57501 uridine phosphorylase (EC 2.4.2.3) I - |
| | | | | | mouse |
| 13013 | 760 | AI136233 | B | | Rattus norvegicus transcribed sequence with moderate similarity to protein |
| | | | | | pdb: 1LBG (E. coli) B Chain B, Lactose Operon Repressor Bound To 21-Base |
| | | | | | Pair Symmetric Operator Dna, Alpha Carbons Only |
| 13020 | 761 | AI136338 | F | | Rattus norvegicus transcribed sequence with weak similarity to protein |
| | | | | | ref: NP_064411.1 (M. musculus) Bat2; DNA segment, Chr 17, human D6S51E; |
| | | | | | RIKEN cDNA 3110039B05 gene [Mus musculus] |
| 9504 | 762 | AI136723 | F | | Rattus norvegicus transcribed sequence with weak similarity to protein |
| | | | | | sp: O88553 (R. norvegicus) ZF37_RAT Zinc finger protein 37 (Zfp-37) |
| 20920 | 763 | AI136891 | N | zinc finger protein 36, C3H type-like 1 | zinc finger protein 36, C3H type-like 1 |
| 13091 | 764 | AI136977 | L | FK506 binding protein 4 (59 kDa) | FK506 binding protein 4 (59 kDa) |
| 14638 | 765 | AI137049 | J | nibrin | nibrin |
| 11937 | 766 | AI137218 | I | | Rattus norvegicus transcribed sequence with moderate similarity to protein |
| | | | | | ref: NP_076977.1 (H. sapiens) hypothetical protein MGC2835 [Homo sapiens] |
| 13111 | 767 | AI137224 | M | oxysterol binding protein-like 1A | oxysterol binding protein-like 1A |
| 5290 | 768 | AI137227 | D | | Rattus norvegicus transcribed sequences |
| 14142 | 769 | AI137435 | K | | Rattus norvegicus transcribed sequences |
| 6638 | 770 | AI137579 | M | | Rattus norvegicus transcribed sequence with strong similarity to protein |
| | | | | | sp: P58006 (M. musculus) SES1_MOUSE Sestrin 1 (p53-regulated protein |
| | | | | | PA26) |
| 16510 | 771 | AI137583 | N | | |
| 7414 | 772 | AI137586 | K | | |
| 13157 | 773 | AI138020 | D | | Rattus norvegicus transcribed sequence with weak similarity to protein |
| | | | | | sp: P48026 (M. musculus) ATDA_MOUSE Diamine acetyltransferase |
| | | | | | (Spermidine/spermine N(1)-acetyltransferase) (SSAT) (Putrescine |
| | | | | | acetyltransferase) |
| 2264 | 774 | AI144741 | F | | Rattus norvegicus transcribed sequences |
| 14458 | 775 | AI145095 | M | | Rattus norvegicus transcribed sequences |
| 3610 | 776 | AI145151 | M, G, I, J | histamine N-methyltransferase | histamine N-methyltransferase |
| 16227 | 777 | AI145177 | F | early growth response 4 | early growth response 4 |
| 165 | 778 | AI145329 | F | malate dehydrogenase, mitochondrial | malate dehydrogenase, mitochondrial |
| 8339 | 779 | AI145761 | M | | Rattus norvegicus Ac2-202 mRNA, complete cds |
| 5531 | 780 | AI145859 | F | | Rattus norvegicus transcribed sequences |
| 18522 | 781 | AI145870 | A, F, I | | Rattus norvegicus transcribed sequence with moderate similarity to protein |
| | | | | | ref: NP_075969.1 (M. musculus) RIKEN cDNA 1110025H10 [Mus musculus] |
| 2059 | 782 | AI146005 | A, H | | Rattus norvegicus transcribed sequence with strong similarity to protein |
| | | | | | sp: Q9WU56 (M. musculus) TRUA_MOUSE tRNA pseudouridine synthase A |
| | | | | | (Pseudouridylate synthase I) (Pseudouridine synthase I) (Uracil hydrolyase) |
| 18503 | 783 | AI169021 | G | calbindin 1 | calbindin 1 |
| 23748 | 784 | AI169037 | F | | Rattus norvegicus transcribed sequence with strong similarity to protein |
| | | | | | sp: Q9R0Q9 (M. musculus) MPU1_MOUSE Mannose-P-dolichol utilization |
| | | | | | defect 1 protein (Suppressor of Lec15 and Lec35 glycosylation mutation |
| | | | | | homolog) (SL15) |
| 5369 | 785 | AI169058 | A | | Rattus norvegicus transcribed sequence with strong similarity to protein |
| | | | | | sp: Q13438 (H. sapiens) OS9_HUMAN Protein OS-9 precursor |
| 7300 | 786 | AI169077 | C | solute carrier family 7 (cationic amino acid transporter, | solute carrier family 7 (cationic amino acid transporter, y + system), member 7 |
| | | | | y + system), member 7 | |
| 11618 | 787 | AI169115 | M, C, F, I | | Rattus norvegicus transcribed sequences |
| 5920 | 788 | AI169163 | B | Na/Pi cotransporter 4 | Na/Pi cotransporter 4 |
| 12979 | 789 | AI169177 | M, B, H, I, L | | Rattus norvegicus transcribed sequence with strong similarity to protein |
| | | | | | sp: P46694 (M. musculus) IEX1_MOUSE Radiation-inducible immediate-early |
| | | | | | gene IEX-1 (Immediate early protein GLY96) (Immediate early response 3 |
| | | | | | protein) |
| 6290 | 790 | AI169232 | C | kinase D-interacting substance of 220 kDa | kinase D-interacting substance of 220 kDa |
| 15002 | 791 | AI169327 | M, E, G, K | tissue inhibitor of metalloproteinase 1 | tissue inhibitor of metalloproteinase 1 |
| 15003 | 791 | AI169327 | G, K | tissue inhibitor of metalloproteinase 1 | tissue inhibitor of metalloproteinase 1 |
| 17160 | 792 | AI169370 | N | alpha-tubulin | alpha-tubulin |
| 16338 | 793 | AI169374 | D | | Rattus norvegicus transcribed sequence with weak similarity to protein |
| | | | | | ref: NP_075794.2 (M. musculus) ubiquitin-associated protein [Mus musculus] |
| 8234 | 794 | AI169517 | B | | Rattus norvegicus transcribed sequence with moderate similarity to protein |
| | | | | | ref: NP_060972.1 (H. sapiens) hypothetical protein PRO1580 [Homo sapiens] |
| 24592 | 795 | AI169622 | D | serine protease inhibitor, Kazal type 1 | serine protease inhibitor, Kazal type 1 |
| 10839 | 796 | AI169655 | G | | Rattus norvegicus transcribed sequence with weak similarity to protein |
| | | | | | ref: NP_035061.1 (M. musculus) nuclear protein 95 [Mus musculus] |
| 12682 | 797 | AI169656 | D | solute carrier family 22 member 8 | solute carrier family 22 member 8 |
| 11429 | 798 | AI169706 | H | ceroid-lipofuscinosis, neuronal 2 | ceroid-lipofuscinosis, neuronal 2 |
| 8749 | 799 | AI169802 | N | ferritin, heavy polypeptide 1 | ferritin, heavy polypeptide 1 |
| 3916 | 800 | AI169947 | M, I | | Rattus norvegicus transcribed sequences |
| 16898 | 801 | AI170249 | B | | Rattus norvegicus transcribed sequence with strong similarity to protein |
| | | | | | ref: NP_061367.1 (M. musculus) G21 protein [Mus musculus] |
| 14929 | 802 | AI170353 | M, G, K | ribosomal protein L21 | ribosomal protein L21 |
| 5297 | 803 | AI170379 | M, D | | Rattus norvegicus transcribed sequence with strong similarity to protein |
| | | | | | sp: O54931 (M. musculus) AKA2_MOUSE A-kinase anchor protein 2 (Protein |
| | | | | | kinase A anchoring protein 2) (PRKA2) (AKAP expressed in kidney and lung) |
| | | | | | (AKAP-KL) |
| 18687 | 804 | AI170568 | N | dodecenoyl-coenzyme A delta isomerase | dodecenoyl-coenzyme A delta isomerase |
| 2534 | 805 | AI170632 | D, K | | Rattus norvegicus transcribed sequences |
| 15393 | 806 | AI170663 | J | gap junction membrane channel protein alpha 1 | gap junction membrane channel protein alpha 1 |
| 10130 | 807 | AI170759 | M, A, I | | Rattus norvegicus transcribed sequences |
| 3803 | 808 | AI170773 | A | | Rattus norvegicus transcribed sequence with moderate similarity to protein |
| | | | | | sp: Q04637 (H. sapiens) IF4G_HUMAN Eukaryotic translation initiation factor 4 |
| | | | | | gamma (elF-4-gamma) (elF-4G) (elF4G) (P220) |
| 2812 | 809 | AI171090 | J | 3-hydroxy-3-methylglutaryl CoA lyase | 3-hydroxy-3-methylglutaryl CoA lyase |
| 22985 | 810 | AI171093 | A, F | | Rattus norvegicus transcribed sequences |
| 22626 | 811 | AI171159 | M, K | a disintegrin and metalloproteinase with | a disintegrin and metalloproteinase with thrombospondin motifs 1 (ADAMTS- |
| | | | | thrombospondin motifs 1 (ADAMTS-1) | 1) |
| 736 | 812 | AI171314 | G | | Rattus norvegicus transcribed sequence with weak similarity to protein |
| | | | | | pdb: 1DT7 (R. norvegicus) A Chain A, Solution Structure Of The C-Terminal |
| | | | | | Negative Regulatory Domain Of P53 In A Complex With Ca2+-Bound |
| | | | | | S100b(Bb) |
| 13285 | 813 | AI171361 | A | | Rattus norvegicus transcribed sequence with strong similarity to protein |
| | | | | | ref: NP_473384.1 (M. musculus) Musashi homolog 2 (Drosophila) [Mus |
| | | | | | musculus] |
| 20828 | 814 | AI171462 | M, E, K | CD24 antigen | CD24 antigen |
| 11761 | 815 | AI171526 | A | | Rattus norvegicus transcribed sequence with moderate similarity to protein |
| | | | | | pdb: 1LBG (E. coli) B Chain B, Lactose Operon Repressor Bound To 21-Base |
| | | | | | Pair Symmetric Operator Dna, Alpha Carbons Only |
| 8215 | 816 | AI171692 | D | | Rattus norvegicus transcribed sequence with strong similarity to protein |
| | | | | | pir: S48737 (R. norvegicus) S48737 kynurenine aminotransferase - rat |
| 10087 | 817 | AI171803 | M | methylmalonate semialdehyde dehydrogenase gene | methylmalonate semialdehyde dehydrogenase gene |
| 11708 | 818 | AI171807 | M | | Rattus norvegicus transcribed sequences |
| 22747 | 819 | AI171832 | M | | Rattus norvegicus transcribed sequence with moderate similarity to protein |
| | | | | | ref: NP_079752.1 (M. musculus) RIKEN cDNA 2410005O16 [Mus musculus] |
| 7197 | 820 | AI171962 | M, G, K, L | annexin 1 | annexin 1 |
| 21956 | 821 | AI171980 | L | | Rattus norvegicus transcribed sequences |
| 11205 | 822 | AI172057 | G | | Rattus norvegicus transcribed sequences |
| 6630 | 823 | AI172184 | F | | Rattus norvegicus transcribed sequence with weak similarity to protein |
| | | | | | sp: P07825 (R. norvegicus) SYPH_RAT SYNAPTOPHYSIN (MAJOR |
| | | | | | SYNAPTIC VESICLE PROTEIN P38) |
| 3698 | 824 | AI172193 | C | | Rattus norvegicus transcribed sequence with strong similarity to protein |
| | | | | | sp: Q9CWP8 (M. musculus) DPD4_MOUSE DNA polymerase delta subunit 4 |
| | | | | | (DNA polymerase delta subunit p12) |
| 18681 | 825 | AI172206 | J | | Rattus norvegicus transcribed sequence with weak similarity to protein |
| | | | | | sp: Q9WUK2 (M. musculus) IF4H_MOUSE Eukaryotic translation initiation |
| | | | | | factor 4H (elF-4H) (Williams-Beuren syndrome chromosome region 1 protein |
| | | | | | homolog) |
| 11968 | 826 | AI172208 | F | | Rattus norvegicus transcribed sequence with weak similarity to protein |
| | | | | | sp: P02773 (R. norvegicus) FETA_RAT Alpha-fetoprotein precursor (Alpha- |
| | | | | | fetoglobulin) (Alpha-1-fetoprotein) |
| 21975 | 827 | AI172247 | N, B, L | xanthine dehydrogenase | xanthine dehydrogenase |
| 21842 | 828 | AI172293 | N | sterol-C4-methyl oxidase-like | sterol-C4-methyl oxidase-like |
| 15382 | 829 | AI172302 | M, H | | Rattus norvegicus transcribed sequence with weak similarity to protein |
| | | | | | pir: S43056 (M. musculus) S43056 hypothetical protein - mouse |
| 17887 | 830 | AI172414 | J | brain protein 44-like | brain protein 44-like |
| 13106 | 831 | AI172615 | D | | Rattus norvegicus transcribed sequences |
| 13457 | 832 | AI175319 | F | | Rattus norvegicus transcribed sequences |
| 4445 | 833 | AI175466 | G | | Rattus norvegicus transcribed sequence with weak similarity to protein |
| | | | | | sp: P20171 (R. norvegicus) RASH_RAT TRANSFORMING PROTEIN P21/H- |
| | | | | | RAS-1 (C-H-RAS) |
| 15663 | 834 | AI175566 | M | t-complex testis expressed 1 | t-complex testis expressed 1 |
| 22352 | 835 | AI175959 | M, H | v-jun sarcoma virus 17 oncogene homolog (avian) | v-jun sarcoma virus 17 oncogene homolog (avian) |
| 22311 | 836 | AI176007 | B | | Rattus norvegicus transcribed sequences |
| 17223 | 837 | AI176140 | D | | Rattus norvegicus transcribed sequence with strong similarity to protein |
| | | | | | ref: NP_077751.1 (M. musculus) testis expressed gene 189 [Mus musculus] |
| 6782 | 838 | AI176170 | B | FK506-binding protein 1a | FK506-binding protein 1a |
| 17921 | 839 | AI176422 | F | | Rattus norvegicus transcribed sequence with strong similarity to protein |
| | | | | | pir: S41115 (H. sapiens) S41115 probable flavoprotein-ubiquinone |
| | | | | | oxidoreductase (EC 1.6.5.—) - human |
| 15191 | 840 | AI176456 | M, N, F, L | | Rattus norvegicus transcribed sequence with strong similarity to protein |
| | | | | | sp: P04355 (R. norvegicus) MT2_RAT METALLOTHIONEIN-II (MT-II) |
| 21088 | 841 | AI176472 | A | | Rattus norvegicus transcribed sequences |
| 24236 | 842 | AI176473 | M | | Rattus norvegicus transcribed sequences |
| 18418 | 843 | AI176483 | D | | Rattus norvegicus transcribed sequences |
| 20717 | 844 | AI176504 | N | glutaminase | glutaminase |
| 16518 | 845 | AI176546 | N, C, K | heat shock protein 86 | heat shock protein 86 |
| 3431 | 846 | AI176595 | N | Cathepsin L | Cathepsin L |
| 17516 | 847 | AI176621 | A, E, L | iron-responsive element-binding protein | iron-responsive element-binding protein |
| 17735 | 848 | AI176658 | C, K | heat shock 27 kDa protein 1 | heat shock 27 kDa protein 1 |
| 23299 | 849 | AI176839 | M | | Rattus norvegicus transcribed sequences |
| 22103 | 850 | AI176849 | L | | Rattus norvegicus transcribed sequence with moderate similarity to protein |
| | | | | | sp: Q92503 (H. sapiens) SC14_HUMAN SEC14-like protein 1 |
| 15146 | 851 | AI176969 | M, K | | Rattus norvegicus transcribed sequences |
| 20873 | 852 | AI177042 | G | | Rattus norvegicus DD6G4-2 mRNA, partial sequence |
| 23018 | 853 | AI177093 | D | | Rattus norvegicus transcribed sequence with moderate similarity to protein |
| | | | | | ref: NP_038755.1 (M. musculus) 5-azacytidine induced gene 2 [Mus musculus] |
| 13310 | 854 | AI177119 | L | | Rattus norvegicus transcribed sequence with weak similarity to protein |
| | | | | | pir: S49158 (R. norvegicus) S49158 complement protein C1q beta chain |
| | | | | | precursor - rat |
| 14083 | 855 | AI177181 | C | | Rattus norvegicus transcribed sequence with weak similarity to protein |
| | | | | | ref: NP_076976.1 (H. sapiens) hypothetical protein MGC2550 [Homo sapiens] |
| 15964 | 856 | AI177360 | M, A, B, H, I, | | Rattus norvegicus transcribed sequences |
| | | | K, L | | |
| 14989 | 857 | AI177366 | M, K | Integrin, beta 1 | Integrin, beta 1 |
| 14978 | 858 | AI177386 | F | protein tyrosine phosphatase, receptor type, D | protein tyrosine phosphatase, receptor type, D |
| 4987 | 859 | AI177428 | F | | Rattus norvegicus transcribed sequence with strong similarity to protein |
| | | | | | ref: NP_055556.1 (H. sapiens) KIAA0652 gene product [Homo sapiens] |
| 18095 | 860 | AI177482 | D | chaperonin subunit 4 (delta) | chaperonin subunit 4 (delta) |
| 15642 | 861 | AI177503 | M, F, J | H3 histone, family 3B | H3 histone, family 3B |
| 150 | 862 | AI177510 | F | | Rattus norvegicus transcribed sequences |
| 17570 | 863 | AI177683 | N, C, E | | Rattus norvegicus mRNA for hnRNP protein, partial |
| 14425 | 864 | AI177755 | M, L | pre-B-cell colony-enhancing factor | pre-B-cell colony-enhancing factor |
| 14484 | 865 | AI177867 | M | | Rattus norvegicus transcribed sequence with weak similarity to protein |
| | | | | | ref: NP_062100.1 (R. norvegicus) intersectin (SH3 domain protein 1A) [Rattus |
| | | | | | norvegicus] |
| 3834 | 866 | AI177902 | G | | Rattus norvegicus transcribed sequence with strong similarity to protein |
| | | | | | ref: NP_080665.1 (M. musculus) RIKEN cDNA 1300003F06 [Mus musculus] |
| 5929 | 867 | AI177962 | E | | Rattus norvegicus transcribed sequence with moderate similarity to protein |
| | | | | | pir: S23251 (M. musculus) S23251 protein-tyrosine kinase (EC 2.7.1.112) ark |
| | | | | | precursor - mouse |
| 17833 | 868 | AI177992 | F | hemoglobin beta chain complex | hemoglobin beta chain complex |
| 19184 | 869 | AI178025 | M, H, I | | Rattus norvegicus transcribed sequence with strong similarity to protein |
| | | | | | sp: P70284 (M. musculus) TGIF_MOUSE 5′-TG-3′ INTERACTING FACTOR |
| | | | | | (HOMEOBOX PROTEIN TGIF) |
| 15259 | 870 | AI178135 | N | complement component 1, q subcomponent binding | complement component 1, q subcomponent binding protein |
| | | | | protein | |
| 6059 | 871 | AI178245 | M, J | | Rattus norvegicus transcribed sequence with moderate similarity to protein |
| | | | | | pir: T13963 (M. musculus) T13963 formin related protein, lymphocyte specific - |
| | | | | | mouse |
| 18996 | 872 | AI178326 | J | | Rattus norvegicus transcribed sequence with strong similarity to protein |
| | | | | | ref: NP_077291.1 (H. sapiens) hypothetical protein MGC4175 [Homo sapiens] |
| 8445 | 873 | AI178394 | J | | Rattus norvegicus transcribed sequences |
| 22197 | 874 | AI178527 | M, H | | Rattus norvegicus clone D920 intestinal epithelium proliferating cell- |
| | | | | | associated mRNA sequence |
| 17563 | 875 | AI178750 | N | eukaryotic translation elongation factor 2 | eukaryotic translation elongation factor 2 |
| 22648 | 876 | AI178996 | A | | Rattus norvegicus transcribed sequence with weak similarity to protein |
| | | | | | sp: Q10758 (R. norvegicus) K2C8_RAT Keratin, type II cytoskeletal 8 |
| | | | | | (Cytokeratin 8) (Cytokeratin endo A) |
| 14983 | 877 | AI179150 | D | | |
| 8477 | 878 | AI179167 | M | | Rattus norvegicus transcribed sequence with strong similarity to protein |
| | | | | | pdb: 1BGM (E. coli) O Chain O, Beta-Galactosidase (Chains I-P) |
| 13611 | 879 | AI179378 | M, F, H | protease, serine, 8 (prostasin) | protease, serine, 8 (prostasin) |
| 13634 | 880 | AI179381 | M | activating transcription factor ATF-4 | activating transcription factor ATF-4 |
| 13607 | 881 | AI179403 | H | | Rattus norvegicus transcribed sequence with weak similarity to protein |
| | | | | | sp: O75643 (H. sapiens) U520_HUMAN U5 small nuclear ribonucleoprotein |
| | | | | | 200 kDa helicase (U5 snRNP-specific 200 kDa protein) (U5-200 KD) |
| 13614 | 882 | AI179407 | B, L | | Rattus norvegicus transcribed sequences |
| 15042 | 883 | AI179422 | M | | Rattus norvegicus transcribed sequences |
| 17829 | 884 | AI179576 | N, J | hemoglobin beta chain complex | hemoglobin beta chain complex |
| 23151 | 885 | AI179595 | B, L | FXYD domain-containing ion transport regulator 6 | FXYD domain-containing ion transport regulator 6 |
| 19822 | 886 | AI179599 | A | Ras-related GTP-binding protein Rab29 | Ras-related GTP-binding protein Rab29 |
| 5901 | 887 | AI179605 | D | | Rattus norvegicus transcribed sequences |
| 16081 | 888 | AI179610 | N | Heme oxygenase | Heme oxygenase |
| 3049 | 889 | AI179892 | M | lipocalin 7 | lipocalin 7 |
| 1687 | 890 | AI179971 | J | hemoglobin, alpha 1 | hemoglobin, alpha 1 |
| 22569 | 891 | AI179979 | M, I | | Rattus norvegicus transcribed sequence with weak similarity to protein |
| | | | | | ref: NP_077349.1 (R. norvegicus) polypeptide GalNAc transferase T1 [Rattus |
| | | | | | norvegicus] |
| 5481 | 892 | AI180170 | M | | Rattus norvegicus transcribed sequence with strong similarity to protein |
| | | | | | pir: S50853 (H. sapiens) S50853 translation releasing factor eRF-1 [validated] - |
| | | | | | human |
| 6765 | 893 | AI227761 | M, H, I | | Rattus norvegicus transcribed sequence with weak similarity to protein |
| | | | | | sp: Q9JLT0 (R. norvegicus) MYHA_RAT Myosin heavy chain, nonmuscle type |
| | | | | | B (Cellular myosin heavy chain, type B) (Nonmuscle myosin heavy chain-B) |
| | | | | | (NMMHC-B) |
| 6487 | 894 | AI227919 | M | | Rattus norvegicus transcribed sequences |
| 19188 | 895 | AI227938 | G, J | | Rattus norvegicus transcribed sequences |
| 1651 | 896 | AI228068 | A, H | Peptidylglycine alpha-amidating monooxygenase | Peptidylglycine alpha-amidating monooxygenase |
| 16913 | 897 | AI228236 | E | | Rattus norvegicus transcribed sequence with strong similarity to protein |
| | | | | | ref: NP_062308.1 (M. musculus) neuronal protein 15.6 [Mus musculus] |
| 15879 | 898 | AI228313 | M, K | | Rattus norvegicus transcribed sequences |
| 13727 | 899 | AI228326 | M, A | | Rattus norvegicus transcribed sequence with weak similarity to protein |
| | | | | | ref: NP_491986.1 (C. elegans) C30F12.2.p [Caenorhabditis elegans] |
| 6102 | 900 | AI228335 | L | | Rattus norvegicus transcribed sequences |
| 17892 | 901 | AI228438 | H | | Rattus norvegicus transcribed sequence with weak similarity to protein |
| | | | | | prf: 2112356A (R. norvegicus) 2112356A hepatocyte nuclear factor [Rattus |
| | | | | | norvegicus] |
| 13740 | 902 | AI228455 | A | | Rattus norvegicus transcribed sequence with moderate similarity to protein |
| | | | | | ref: NP_037457.2 (H. sapiens) KIAA0943 protein [Homo sapiens] |
| 1474 | 903 | AI228548 | N | | Rattus norvegicus transcribed sequence with strong similarity to protein |
| | | | | | sp: P35467 (R. norvegicus) S10A_RAT S-100 protein, alpha chain |
| 18612 | 904 | AI228624 | G | ribosomal protein L29 | ribosomal protein L29 |
| 13176 | 905 | AI228654 | M | | Rattus norvegicus transcribed sequences |
| 4392 | 906 | AI228674 | H | Peptidylprolyl isomerase A (cyclophilin A) | Peptidylprolyl isomerase A (cyclophilin A) |
| 15296 | 907 | AI228738 | N, H, I | (FK506 binding protein 2, FK506-binding protein 1a) | (FK506 binding protein 2, FK506-binding protein 1a) |
| 22328 | 908 | AI229142 | M | | Rattus norvegicus transcribed sequences |
| 7892 | 909 | AI229172 | K | | Rattus norvegicus transcribed sequence with weak similarity to protein |
| | | | | | sp: P06399 (R. norvegicus) FIBA_RAT Fibrinogen alpha/alpha-E chain |
| | | | | | precursor |
| 6886 | 910 | AI229332 | F | | Rattus norvegicus transcribed sequence |
| 23435 | 911 | AI229502 | H, I | | Rattus norvegicus transcribed sequence with weak similarity to protein |
| | | | | | ref: NP_061898.1 (H. sapiens) chromosome 20 open reading frame 16 [Homo |
| | | | | | sapiens] |
| 17448 | 912 | AI229637 | N | MYB binding protein 1a | MYB binding protein 1a |
| 3099 | 913 | AI229680 | E | | Rattus norvegicus transcribed sequence with moderate similarity to protein |
| | | | | | ref: NP_004542.1 (H. sapiens) NADH dehydrogenase (ubiquinone) Fe—S |
| | | | | | protein 3 (30 kD) (NADH-coenzyme Q reductase) [Homo sapiens] |
| 1652 | 914 | AI229728 | A | Peptidylglycine alpha-amidating monooxygenase | Peptidylglycine alpha-amidating monooxygenase |
| 9035 | 915 | AI229879 | F, J | | Rattus norvegicus transcribed sequences |
| 11866 | 916 | AI229966 | F | | Rattus norvegicus transcribed sequence with strong similarity to protein |
| | | | | | ref: NP_032776.1 (M. musculus) nucleoredoxin [Mus musculus] |
| 12587 | 917 | AI229979 | M | | Rattus norvegicus transcribed sequence with weak similarity to protein |
| | | | | | sp: Q63344 (R. norvegicus) MOT2_RAT Monocarboxylate transporter 2 (MCT |
| | | | | | 2) |
| 24042 | 918 | AI230002 | C | | Rattus norvegicus transcribed sequences |
| 12551 | 919 | AI230056 | C, K | | Rattus norvegicus transcribed sequences |
| 6629 | 920 | AI230165 | D | | Rattus norvegicus transcribed sequence with strong similarity to protein |
| | | | | | ref: NP_057038.1 (H. sapiens) CGI-26 protein [Homo sapiens] |
| 15862 | 921 | AI230228 | N | | Rattus norvegicus phosphoserine aminotransferase mRNA, complete cds |
| 4280 | 922 | AI230247 | F | selenoprotein P, plasma, 1 | selenoprotein P, plasma, 1 |
| 14450 | 923 | AI230262 | B | | Rattus norvegicus transcribed sequence with weak similarity to protein |
| | | | | | sp: Q13045 (H. sapiens) FLIH_HUMAN Flightless-I protein homolog |
| 18528 | 924 | AI230284 | K | Tropomycin 4 | Tropomycin 4 |
| 20895 | 925 | AI230549 | H | | Rattus norvegicus transcribed sequences |
| 12961 | 926 | AI230554 | M | | Rattus norvegicus transcribed sequences |
| 24264 | 927 | AI230712 | M | Subtilisin - like endoprotease | Subtilisin - like endoprotease |
| 18529 | 928 | AI230716 | M, K | Tropomycin 4 | Tropomycin 4 |
| 13618 | 929 | AI230724 | M, I | SAC1 (supressor of actin mutations 1, homolog)-like (S. cerevisiae) | SAC1 (supressor of actin mutations 1, homolog)-like (S. cerevisiae) |
| 24108 | 930 | AI230728 | G | | Rattus norvegicus transcribed sequence with strong similarity to protein |
| | | | | | pir: S42114 (M. musculus) S42114 small nuclear ribonucleoprotein U1A- |
| | | | | | mouse |
| 21648 | 931 | AI230880 | J | | Rattus norvegicus transcribed sequence with weak similarity to protein |
| | | | | | pir: JE0343 (R. norvegicus) JE0343 terf protein - rat |
| 1688 | 932 | AI230970 | J | hemoglobin, alpha 1 | hemoglobin, alpha 1 |
| 16087 | 933 | AI231011 | F | | Rattus norvegicus transcribed sequences |
| 3125 | 934 | AI231028 | K | erythrocyte protein band 4.1-like 1 | erythrocyte protein band 4.1-like 1 |
| 13934 | 935 | AI231044 | F | | Rattus norvegicus transcribed sequences |
| 15132 | 936 | AI231180 | G | calcium-regulated heat-stable protein (24 kD) | calcium-regulated heat-stable protein (24 kD) |
| 18678 | 937 | AI231295 | L | | Rattus norvegicus transcribed sequences |
| 17268 | 938 | AI231317 | F | | Rattus norvegicus transcribed sequence with strong similarity to protein |
| | | | | | ref: NP_080171.1 (M. musculus) endothelial-derived gene [Mus musculus] |
| 3050 | 939 | AI231321 | M | lipocalin 7 | lipocalin 7 |
| 13966 | 940 | AI231421 | B | nuclear ubiquitous casein kinase 2 | nuclear ubiquitous casein kinase 2 |
| 12343 | 941 | AI231433 | C | | Rattus norvegicus transcribed sequences |
| 17196 | 942 | AI231519 | M, N, I | sialyltransferase 7c | sialyltransferase 7c |
| 13092 | 943 | AI231547 | L | | Rattus norvegicus transcribed sequence with strong similarity to protein |
| | | | | | pir: S14538 (M. musculus) S14538 transition protein - mouse |
| 15171 | 944 | AI231792 | H | | Rattus norvegicus transcribed sequence with strong similarity to protein |
| | | | | | sp: Q9JLV1 (M. musculus) BAG3_MOUSE BAG-family molecular chaperone |
| | | | | | regulator-3 (BCL-2 binding athanogene-3) (BAG-3) (Bcl-2-binding protein Bis) |
| 8211 | 945 | AI231807 | H | ferritin light chain 1 | ferritin light chain 1 |
| 8212 | 945 | AI231807 | N, L | ferritin light chain 1 | ferritin light chain 1 |
| 20702 | 946 | AI231821 | N | stathmin 1 | stathmin 1 |
| 10789 | 947 | AI232059 | M | aspartoacylase | aspartoacylase |
| 14020 | 948 | AI232076 | M | | Rattus norvegicus transcribed sequence with moderate similarity to protein |
| | | | | | ref: NP_076138.1 (M. musculus) harmonin isoform a1 [Mus musculus] |
| 573 | 949 | AI232087 | N, J | hydroxyacid oxidase (glycolate oxidase) 3 | hydroxyacid oxidase (glycolate oxidase) 3 |
| 12366 | 950 | AI232088 | F | | Rattus norvegicus transcribed sequences |
| 15039 | 951 | AI232096 | M, F, I | solute carrier family 15, member 2 | solute carrier family 15, member 2 |
| 9332 | 952 | AI232210 | F | MIC2 like 1 | MIC2 like 1 |
| 409 | 953 | AI232268 | M, N, I | low density lipoprotein receptor-related protein | low density lipoprotein receptor-related protein associated protein 1 |
| | | | | associated protein 1 | |
| 15955 | 954 | AI232294 | M, G, I | | Rattus norvegicus transcribed sequences |
| 15246 | 955 | AI232332 | D | | Rattus norvegicus transcribed sequence with moderate similarity to protein |
| | | | | | pdb: 1LBG (E. coli) B Chain B, Lactose Operon Repressor Bound To 21-Base |
| | | | | | Pair Symmetric Operator Dna, Alpha Carbons Only |
| 24321 | 956 | AI232340 | M, K, L | chemokine (C—X—C motif) ligand 12 | chemokine (C—X—C motif) ligand 12 |
| 16172 | 957 | AI232341 | K | | Rattus norvegicus transcribed sequence with weak similarity to protein |
| | | | | | ref: NP_498462.1 (C. elegans) C13B9.2.p [Caenorhabditis elegans] |
| 5601 | 958 | AI232461 | M, I | flavin containing monooxygenase 4 | flavin containing monooxygenase 4 |
| 11157 | 959 | AI232494 | K | | Rattus norvegicus transcribed sequence with strong similarity to protein |
| | | | | | pdb: 1BGM (E. coli) O Chain O, Beta-Galactosidase (Chains I-P) |
| 4440 | 960 | AI232643 | M, I | | Rattus norvegicus transcribed sequences |
| 7285 | 961 | AI232731 | M | | Rattus norvegicus transcribed sequence with moderate similarity to protein |
| | | | | | ref: NP_080434.1 (M. musculus) RIKEN cDNA 0610042E07 [Mus musculus] |
| 17695 | 962 | AI232784 | E | | Rattus norvegicus transcribed sequence with weak similarity to protein |
| | | | | | sp: P97852 (R. norvegicus) DHB4_RAT Estradiol 17 beta-dehydrogenase 4 (17- |
| | | | | | beta-HSD 4) (17-beta-hydroxysteroid dehydrogenase 4) (HSD IV) |
| 12467 | 963 | AI232924 | M | | Rattus norvegicus transcribed sequences |
| 19998 | 964 | AI232999 | M | PDZ domain containing 1 | PDZ domain containing 1 |
| 3823 | 965 | AI233147 | M | | Rattus norvegicus transcribed sequence with weak similarity to protein |
| | | | | | sp: Q63413 (R. norvegicus) HE47_RAT Probable ATP-dependent RNA |
| | | | | | helicase p47 |
| 11967 | 966 | AI233155 | M, J | | Rattus norvegicus transcribed sequences |
| 13954 | 967 | AI233209 | M | crystallin, mu | crystallin, mu |
| 4574 | 968 | AI233216 | N | glutamate dehydrogenase 1 | glutamate dehydrogenase 1 |
| 17907 | 969 | AI233224 | M | epidermal growth factor receptor | epidermal growth factor receptor |
| 10378 | 970 | AI233300 | A | | Rattus norvegicus transcribed sequence with moderate similarity to protein |
| | | | | | sp: P06684 (M. musculus) CO5_MOUSE Complement C5 precursor (Hemolytic |
| | | | | | complement) [Contains: C5A anaphylatoxin] |
| 14120 | 971 | AI233433 | K | | Rattus norvegicus transcribed sequences |
| 19509 | 972 | AI233437 | L | | Rattus norvegicus transcribed sequences |
| 14095 | 973 | AI233468 | M, I | | Rattus norvegicus transcribed sequence with weak similarity to protein |
| | | | | | ref: NP_542421.1 (R. norvegicus) cask-interacting protein 1 [Rattus |
| | | | | | norvegicus] |
| 14131 | 974 | AI233493 | L | | Rattus norvegicus transcribed sequences |
| 6046 | 975 | AI233530 | M, B, I, L | | Rattus norvegicus transcribed sequences |
| 7888 | 976 | AI233583 | M | tissue inhibitor of metalloproteinase 2 | tissue inhibitor of metalloproteinase 2 |
| 3816 | 977 | AI233729 | H | | Rattus norvegicus transcribed sequence with strong similarity to protein |
| | | | | | ref: NP_542121.1 (M. musculus) proteasome (prosome, macropain) 26S |
| | | | | | subunit, non-ATPase, 5 [Mus musculus] |
| 7804 | 978 | AI233771 | K | | Rattus norvegicus transcribed sequences |
| 13563 | 979 | AI233773 | E | MAWD binding protein | MAWD binding protein |
| 1653 | 980 | AI233806 | A | Peptidylglycine alpha-amidating monooxygenase | Peptidylglycine alpha-amidating monooxygenase |
| 535 | 981 | AI233916 | E | | Rattus norvegicus transcribed sequences |
| 13392 | 982 | AI234146 | M | cysteine rich protein 1 | cysteine rich protein 1 |
| 8325 | 983 | AI234293 | E | | Rattus norvegicus transcribed sequence with weak similarity to protein |
| | | | | | ref: NP_008958.1 (H. sapiens) topoisomerase (DNA) II binding protein [Homo |
| | | | | | sapiens] |
| 6416 | 984 | AI234295 | M, K | solute carrier family 34 (sodium phosphate), member 2 | solute carrier family 34 (sodium phosphate), member 2 |
| 17764 | 985 | AI234604 | N | heat shock protein 8 | heat shock protein 8 |
| 14677 | 986 | AI234620 | M, G, K, L | | Rattus norvegicus transcribed sequence with weak similarity to protein |
| | | | | | ref: NP_071796.1 (R. norvegicus) plectin [Rattus norvegicus] |
| 22213 | 987 | AI234858 | K | | Rattus norvegicus transcribed sequence with weak similarity to protein |
| | | | | | pir: JC7152 (M. musculus) JC7152 UV-damaged DNA-binding 127K protein - |
| | | | | | mouse |
| 26319 | 988 | AI234887 | H | | Rattus norvegicus transcribed sequence with strong similarity to protein |
| | | | | | ref: NP_076401.1 (M. musculus) ubiquitous protein kinase-like (105 kDa) [Mus |
| | | | | | musculus] |
| 15277 | 989 | AI234889 | D | ubiquitin-conjugating enzyme E2D 3 (homologous to | ubiquitin-conjugating enzyme E2D 3 (homologous to yeast UBC4/5) |
| | | | | yeast UBC4/5) | |
| 22662 | 990 | AI234939 | M | | Rattus norvegicus transcribed sequence with strong similarity to protein |
| | | | | | ref: NP_076320.1 (M. musculus) RIKEN cDNA 1500035H01 [Mus musculus] |
| 24649 | 991 | AI234950 | C, K | acid phosphatase 2 | acid phosphatase 2 |
| 3875 | 992 | AI235047 | M, A | | Rattus norvegicus transcribed sequence with strong similarity to protein |
| | | | | | pir: S50082 (H. sapiens) S50082 nuclear cap binding protein - human |
| 8850 | 993 | AI235059 | B | | Rattus norvegicus transcribed sequences |
| 15004 | 994 | AI235224 | M, G, K | tissue inhibitor of metalloproteinase 1 | tissue inhibitor of metalloproteinase 1 |
| 6632 | 995 | AI235277 | C | | Rattus norvegicus transcribed sequence with strong similarity to protein |
| | | | | | sp: P54577 (H. sapiens) SYY_HUMAN Tyrosyl-tRNA synthetase (Tyrosyl - |
| | | | | | tRNA ligase) (TyrRS) |
| 896 | 996 | AI235313 | E | | Rattus norvegicus transcribed sequences |
| 15468 | 997 | AI235364 | N | ribosomal protein S15a | ribosomal protein S15a |
| 7937 | 998 | AI235414 | B | | Rattus norvegicus transcribed sequences |
| 1462 | 999 | AI235585 | M, E, G | cathepsin D | cathepsin D |
| 21061 | 1000 | AI235631 | M, A | | Rattus norvegicus transcribed sequence with strong similarity to protein |
| 21061 | 1000 | AI235631 | M, A | | ref: NP_114131.1 (H. sapiens) transmembrane protein induced by tumor |
| | | | | | necrosis factor alpha [Homo sapiens] |
| 11164 | 1001 | AI235739 | M, I | | Rattus norvegicus transcribed sequence with moderate similarity to protein |
| | | | | | pir: A56716 (H. sapiens) A56716 aromatic ester hydrolase (EC 3.1.1.—) - human |
| 7307 | 1002 | AI235935 | G, K | | Rattus norvegicus transcribed sequence with weak similarity to protein |
| | | | | | ref: NP_071953.1 (R. norvegicus) C1-tetrahydrofolate synthase [Rattus |
| | | | | | norvegicus] |
| 15836 | 1003 | AI235951 | A | | Rattus norvegicus transcribed sequence with moderate similarity to protein |
| | | | | | ref: NP_004540.1 (H. sapiens) NADH dehydrogenase (ubiquinone) 1, |
| | | | | | subcomplex unknown, 2 (14.5 kD, B14.5b) [Homo sapiens] |
| 3091 | 1004 | AI236027 | M, A, C, H, I | | Rattus norvegicus transcribed sequences |
| 14867 | 1005 | AI236061 | M | | Rattus norvegicus transcribed sequences |
| 22855 | 1006 | AI236150 | A | | Rattus norvegicus transcribed sequence with strong similarity to protein |
| | | | | | ref: NP_062416.1 (M. musculus) Down syndrome critical region protein c [Mus |
| | | | | | musculus] |
| 13004 | 1007 | AI236284 | J, L | fatty acid Coenzyme A ligase, long chain 4 | fatty acid Coenzyme A ligase, long chain 4 |
| 15051 | 1008 | AI236332 | M | | Rattus norvegicus Ab2-402 mRNA, complete cds |
| 1689 | 1009 | AI236360 | J | hemoglobin, alpha 1 | hemoglobin, alpha 1 |
| 10667 | 1010 | AI236366 | C | siah binding protein 1; FBP interacting repressor; | siah binding protein 1; FBP interacting repressor; pyrimidine tract binding |
| | | | | pyrimidine tract binding splicing factor; Ro | splicing factor; Ro ribonucleoprotein-binding protein 1 |
| | | | | nbonucleoprotein-binding protein 1 | |
| 783 | 1011 | AI236589 | F | lipase, hormone sensitive | lipase, hormone sensitive |
| 17950 | 1012 | AI236590 | L | | Rattus norvegicus transcribed sequence with strong similarity to protein |
| | | | | | sp: P22366 (M. musculus) MY88_MOUSE MYELOID DIFFERENTIATION |
| | | | | | PRIMARY RESPONSE PROTEIN MYD88 |
| 18259 | 1013 | AI236601 | H | | Rattus norvegicus transcribed sequence with strong similarity to protein |
| | | | | | sp: Q81699 (M. musculus) H105_MOUSE Heat-shock protein 105 kDa (Heat |
| | | | | | shock-related 100 kDa protein E7I) (HSP-E7I) (Heat shock 110 kDa protein) |
| | | | | | (42 degrees C-HSP) |
| 2574 | 1014 | AI236616 | F | | Rattus norvegicus transcribed sequences |
| 16859 | 1015 | AI236753 | M, D | | Rattus norvegicus transcribed sequences |
| 5208 | 1016 | AI236754 | G | pregnancy-induced growth inhibitor | pregnancy-induced growth inhibitor |
| 24388 | 1017 | AI236772 | M, K | | Rattus norvegicus transcribed sequence with weak similarity to protein |
| | | | | | ref: NP_113865.1 (R. norvegicus) four and a half LIM domains 2 [Rattus |
| | | | | | norvegicus] |
| 15850 | 1018 | AI236795 | N, K | | Rattus norvegicus heat shock protein 90 beta mRNA, partial sequence |
| 18303 | 1019 | AI236863 | M | | Rattus norvegicus transcribed sequences |
| 19890 | 1020 | AI237108 | F | | Rattus norvegicus transcribed sequences |
| 23076 | 1021 | AI237388 | K | | Rattus norvegicus transcribed sequence with weak similarity to protein |
| | | | | | sp: P20695 (R. norvegicus) IFR1_RAT INTERFERON-RELATED |
| | | | | | DEVELOPMENTAL REGULATOR 1 (NERVE GROWTH FACTOR- |
| | | | | | INDUCIBLE PROTEIN PC4) (IRPR) |
| 21653 | 1022 | AI237535 | M, C, K | LPS-induced TNF-alpha factor | LPS-induced TNF-alpha factor |
| 3615 | 1023 | AI237645 | J | | Rattus norvegicus transcribed sequences |
| 8759 | 1024 | AI237646 | B, L | | Rattus norvegicus transcribed sequences |
| 3467 | 1025 | AI237835 | M, I | | Rattus norvegicus transcribed sequence with moderate similarity to protein |
| | | | | | sp: O09015 (R. norvegicus) MXI1_RAT MAX interacting protein 1 (MXI1 |
| | | | | | protein) |
| 6127 | 1026 | AI638960 | A | | Rattus norvegicus transcribed sequences |
| 11692 | 1027 | AI638982 | M, N | sulfotransferase family, cytosolic, 1C, member 2 | sulfotransferase family, cytosolic, 1C, member 2 |
| 20000 | 1028 | AI638989 | A, B | | Rattus norvegicus transcribed sequence with moderate similarity to protein |
| | | | | | pir: T14273 (M. musculus) T14273 zinc finger protein 106 - mouse |
| 23781 | 1029 | AI639012 | F | | Rattus norvegicus transcribed sequence with weak similarity to protein |
| | | | | | ref: NP_076947.1 (H. sapiens) hypothetical protein MGC2601 [Homo sapiens] |
| 25862 | 1030 | AI639022 | A | | |
| 19997 | 1031 | AI639043 | N | | Rattus norvegicus transcribed sequences |
| 10071 | 1032 | AI639058 | N, F | | Rattus norvegicus transcribed sequence with strong similarity to protein |
| | | | | | ref: NP_075371.1 (M. musculus) Nedd4 WW binding# protein 4; Nedd4 WW- |
| | | | | | binding protein 4 [Mus musculus] |
| 16676 | 1033 | AI639082 | N, E | mini chromosome maintenance deficient 6 (S. cerevisiae) | mini chromosome maintenance deficient 6 (S. cerevisiae) |
| 19952 | 1034 | AI639108 | N | | Rattus norvegicus transcribed sequences |
| 25902 | 1035 | AI639154 | H | | Rattus norvegicus transcribed sequence |
| 19112 | 1036 | AI639157 | J | ribosomal protein L13 | ribosomal protein L13 |
| 15379 | 1037 | AI639162 | N, B | | Rattus norvegicus transcribed sequences |
| 25907 | 1038 | AI639167 | N | | Rattus norvegicus transcribed sequences |
| 25921 | 1039 | AI639209 | A, F | | |
| 15330 | 1040 | AI639285 | M, F, I | | Rattus norvegicus transcribed sequences |
| 19152 | 1041 | AI639387 | M, D | | Rattus norvegicus transcribed sequence with strong similarity to protein |
| | | | | | sp: P58064 (M. musculus) RT06_MOUSE Mitochondrial 28S ribosomal protein |
| | | | | | S6 (MRP-S6) |
| 19679 | 1042 | AI639418 | M, A, D, G, I | deiodinase, iodothyronine, type I | deiodinase, iodothyronine, type I |
| 19002 | 1043 | AI639465 | N | ring finger protein 28 | ring finger protein 28 |
| 19003 | 1043 | AI639465 | F | ring finger protein 28 | ring finger protein 28 |
| 21542 | 1044 | AI639476 | J | | Rattus norvegicus transcribed sequence with strong similarity to protein |
| | | | | | ref: NP_058622.1 (M. musculus) squamous cell carcinoma antigen recognized |
| | | | | | by T-cells 3 [Mus musculus] |
| 19943 | 1045 | AI639479 | M, N, F, G | | Rattus norvegicus transcribed sequence with strong similarity to protein |
| | | | | | prf: 2008147A (R. norvegicus) 2008147A protein RAKb [Rattus norvegicus] |
| 20082 | 1046 | AI639488 | M, N, H, I, J | | Rattus norvegicus transcribed sequence with strong similarity to protein |
| | | | | | pir: A42772 (R. norvegicus) A42772 mdm2 protein - rat (fragments) |
| 20056 | 1047 | AI639504 | M, I | | Rattus norvegicus Ac2-202 mRNA, complete cds |
| 15237 | 1048 | AI639535 | J | | Rattus norvegicus transcribed sequence with weak similarity to protein |
| | | | | | ref: NP_445944.1 (R. norvegicus) transporter-like protein [Rattus norvegicus] |
| 1203 | 1049 | AJ000485 | N | cytoplasmic linker 2 | cytoplasmic linker 2 |
| 25233 | 1050 | AJ000556 | E | Janus kinase 1 | Janus kinase 1 |
| 14332 | 1051 | AJ001044 | D | tumor-associated calcium signal transducer 1 | tumor-associated calcium signal transducer 1 |
| 25235 | 1052 | AJ001290 | F | solute carrier family 5 (inositol transporters), member 3 | solute carrier family 5 (inositol transporters), member 3 |
| 12422 | 1053 | AJ006971 | N | Death-associated like kinase | Death-associated like kinase |
| 12423 | 1053 | AJ006971 | N | Death-associated like kinase | Death-associated like kinase |
| 25247 | 1054 | AJ011608 | N | DNA primase, p49 subunit | DNA primase, p49 subunit |
| 20404 | 1055 | AJ011656 | N, L | claudin 3 | claudin 3 |
| 16350 | 1056 | AJ011811 | G | claudin 7 | claudin 7 |
| 16351 | 1056 | AJ011811 | G | claudin 7 | claudin 7 |
| 13485 | 1057 | AJ012603 | B | a disintegrin and metalloproteinase domain 17 | a disintegrin and metalloproteinase domain 17 |
| 4290 | 1058 | AJ224120 | L | peroxisomal membrane protein Pmp26p (Peroxin-11) | peroxisomal membrane protein Pmp26p (Peroxin-11) |
| 18956 | 1059 | D00512 | N | acetyl-coenzyme A acetyltransferase 1 | acetyl-coenzyme A acetyltransferase 1 |
| 15408 | 1060 | D00569 | N | 2,4-dienoyl CoA reductase 1, mitochondrial | 2,4-dienoyl CoA reductase 1, mitochondrial |
| 15409 | 1060 | D00569 | N, L | 2,4-dienoyl CoA reductase 1, mitochondrial | 2,4-dienoyl CoA reductase 1, mitochondrial |
| 4615 | 1061 | D00680 | N | glutathione peroxidase 3 | glutathione peroxidase 3 |
| 18686 | 1062 | D00729 | N | dodecenoyl-coenzyme A delta isomerase | (Rattus norvegicus mRNA for delta3, delta2-enoyl-CoA isomerase, complete |
| | | | | | cds, dodecenoyl-coenzyme A delta isomerase) |
| 2554 | 1063 | D00913 | M, N | intercellular adhesion molecule 1 | intercellular adhesion molecule 1 |
| 2555 | 1063 | D00913 | M, C, I | intercellular adhesion molecule 1 | intercellular adhesion molecule 1 |
| 1515 | 1064 | D10233 | J | renin-binding protein | renin-binding protein |
| 1306 | 1065 | D10262 | N | choline kinase | choline kinase |
| 24821 | 1066 | D10392 | J | syntaxin 1a | syntaxin 1a |
| 3608 | 1067 | D10693 | M, J | histamine N-methyltransferase | histamine N-methyltransferase |
| 25253 | 1068 | D10754 | H | proteasome (prosome, macropain) subunit, beta type 6 | proteasome (prosome, macropain) subunit, beta type 6 |
| 15535 | 1069 | D10755 | L | proteasome (prosome, macropain) subunit, alpha type 6 | poroteasome (prosome, macropain) subunit, alpha type 6 |
| 3254 | 1070 | D10756 | N, L | proteasome (prosome, macropain) subunit, alpha type 5 | proteasome (prosome, macropain) subunit, alpha type 5 |
| 4003 | 1071 | D10757 | N | proteosome (prosome, macropain) subunit, beta type 9 | proteosome (prosome, macropain) subunit, beta type 9 (large multifunctional |
| | | | | (large multifunctional protease 2) | protease 2) |
| 23109 | 1072 | D10854 | N | aldo-keto reductase family 1, member A1 | aldo-keto reductase family 1, member A1 |
| 8640 | 1073 | D12769 | D | Kruppel-like factor 9 | Kruppel-like factor 9 |
| 24428 | 1074 | D13126 | N | neural visinin-like Ca2+-binding protein type 3 | neural visinin-like Ca2+-binding protein type 3 |
| 15281 | 1075 | D13623 | N | | |
| 25257 | 1075 | D13623 | N | | |
| 1214 | 1076 | D13871 | M, N, K | (nuclear receptor subfamily 1, group H, member 4, | (nuclear receptor subfamily 1, group H, member 4, solute carrier family 2, |
| | | | | solute carrier family 2, member 5) | member 5) |
| 18958 | 1077 | D13921 | N | acetyl-coenzyme A acetyltransferase 1 | acetyl-coenzyme A acetyltransferase 1 |
| 18727 | 1078 | D13978 | N | argininosuccinate lyase | argininosuccinate lyase |
| 11434 | 1079 | D14014 | N, B | cyclin D1 | cyclin D1 |
| 19834 | 1080 | D14048 | E | system N1 Na+ and H+-coupled glutamine transporter | system N1 Na+ and H+-coupled glutamine transporter |
| 18246 | 1081 | D14441 | N, B, F | brain acidic membrane protein | brain acidic membrane protein |
| 503 | 1082 | D16443 | C | prostaglandin E receptor 3 | prostaglandin E receptor 3 |
| 16768 | 1083 | D16478 | N | hydroxyacyl-Coenzyme A dehydrogenase/3-ketoacyl- | hydroxyacyl-Coenzyme A dehydrogenase/3-ketoacyl-Coenzyme A |
| | | | | Coenzyme A hiolase/enoyl-Coenzyme A hydratase | hiolase/enoyl-Coenzyme A hydratase (trifunctional protein), alpha subunit |
| | | | | (trifunctional protein), alpha subunit | |
| 3015 | 1084 | D16554 | A | polyubiquitin | polyubiquitin |
| 18452 | 1085 | D17370 | M, N | CTL target antigen | CTL target antigen |
| 18453 | 1085 | D17370 | N, G | CTL target antigen | CTL target antigen |
| 16683 | 1086 | D17445 | N | Tyrosine 3-monooxygenase/tryptophan 5- | Tyrosine 3-monooxygenase/tryptophan 5-monooxygenase activation protein, |
| | | | | monooxygenase activation protein, eta polypeptide | eta polypeptide |
| 16684 | 1086 | D17445 | M | Tyrosine 3-monooxygenase/tryptophan 5- | Tyrosine 3-monooxygenase/tryptophan 5-monooxygenase activation protein, |
| | | | | monooxygenase activation protein, eta polypeptide | eta polypeptide |
| 13369 | 1087 | D21132 | D | phosphotidylinositol transfer protein, beta | phosphotidylinositol transfer protein, beta |
| 24885 | 1088 | D25224 | N | laminin receptor 1 (67 kD, ribosomal protein SA) | laminin receptor 1 (67 kD, ribosomal protein SA) |
| 472 | 1089 | D26111 | G | chloride channel K1-like | chloride channel K1-like |
| 20493 | 1090 | D28339 | M, N | 3-hydroxyanthranilate 3,4-dioxygenase | 3-hydroxyanthranilate 3,4-dioxygenase |
| 16610 | 1091 | D28557 | N, E, L | cold shock domain protein A | cold shock domain protein A |
| 25279 | 1092 | D30740 | C | Tyrosine 3-monooxygenase/tryptophan 5- | Tyrosine 3-monooxygenase/tryptophan 5-monooxygenase activation protein, |
| | | | | monooxygenase activation protein, zeta polypeptide | zeta polypeptide |
| 28 | 1093 | D31662 | M, F, G, I, J, L | Regucalcin | Regucalcin |
| 187 | 1094 | D32209 | F | acidic nuclear phosphoprotein 32 family, member A | acidic nuclear phosphoprotein 32 family, member A |
| 16681 | 1095 | D37920 | N, B, L | squalene epoxidase | squalene epoxidase |
| 24631 | 1096 | D37951 | F | human immunodeficiency virus type 1 enhancer- | human immunodeficiency virus type 1 enhancer-binding protein 2 |
| | | | | binding protein 2 | |
| 5492 | 1097 | D38061 | N | UDP glycosyltransferase 1 family, polypeptide A6 | UDP glycosyltransferase 1 family, polypeptide A6 |
| 18028 | 1098 | D38062 | N | UDP glycosyltransferase 1 family, polypeptide A7 | UDP glycosyltransferase 1 family, polypeptide A7 |
| 1354 | 1099 | D38065 | N | UDP glycosyltransferase 1 family, polypeptide A1 | UDP glycosyltransferase 1 family, polypeptide A1 |
| 755 | 1100 | D38448 | M, N | diacylglycerol kinase, gamma | diacylglycerol kinase, gamma |
| 16650 | 1101 | D42137 | E | annexin 5 | annexin 5 |
| 25290 | 1102 | D42148 | N, J | growth arrest specific 6 | growth arrest specific 6 |
| 20494 | 1103 | D44494 | N, E | 3-hydroxyanthranilate 3,4-dioxygenase | 3-hydroxyanthranilate 3,4-dioxygenase |
| 20801 | 1104 | D44495 | M, N, H, I, J, L | apurinic/apyrimidinic endonuclease 1 | apurinic/apyrimidinic endonuclease 1 |
| 18750 | 1105 | D45250 | N, G | protease (prosome, macropain) 28 subunit, beta | protease (prosome, macropain) 28 subunit, beta |
| 20960 | 1106 | D45254 | D | cellular nucleic acid binding protein | cellular nucleic acid binding protein |
| 245 | 1107 | D45412 | J | protein tyrosine phosphatase, receptor type, O | protein tyrosine phosphatase, receptor type, O |
| 16354 | 1108 | D50564 | N, C | mercaptopyruvate sulfurtransferase | mercaptopyruvate sulfurtransferase |
| 1884 | 1109 | D50695 | I | proteasome (prosome, macropain) 26S subunit, | proteasome (prosome, macropain) 26S subunit, ATPase, 4 |
| | | | | ATPase, 4 | |
| 811 | 1110 | D63704 | M, I | dihydropyrimidinase | dihydropyrimidinase |
| 812 | 1110 | D63704 | M, I | dihydropyrimidinase | dihydropyrimidinase |
| 21147 | 1111 | D63772 | M, F, H, I, J, L | solute carrier family 1, member 1 | solute carrier family 1, member 1 |
| 770 | 1112 | D83044 | M, N | solute carrier family 22, member 2 | solute carrier family 22, member 2 |
| 15126 | 1113 | D83796 | N | (UDP glycosyltransferase 1 family, polypeptide A1, | (UDP glycosyltransferase 1 family, polypeptide A1, UDP glycosyltransferase 1 |
| | | | | UDP glycosyltransferase 1 family, polypeptide A6, UDP | family, polypeptide A6, UDP glycosyltransferase 1 family, polypeptide A7, |
| | | | | glycosyltransferase 1 family, polypeptide A7, UDP- | UDP-glucuronosyltransferase 1A8) |
| | | | | glucuronosyltransferase 1A8) | |
| 15437 | 1114 | D84418 | E | high mobility group box 2 | high mobility group box 2 |
| 17554 | 1115 | D85100 | N | solute carrier family 27 (fatty acid transporter), member | solute carrier family 27 (fatty acid transporter), member 32 |
| | | | | 32 | |
| 13005 | 1116 | D85189 | N, C | fatty acid Coenzyme A ligase, long chain 4 | fatty acid Coenzyme A ligase, long chain 4 |
| 16448 | 1117 | D86297 | N | aminolevulinic acid synthase 2 | aminolevulinic acid synthase 2 |
| 15297 | 1118 | D86641 | N, K | (FK506 binding protein 2, FK506-binding protein 1a) | (FK506 binding protein 2, FK506-binding protein 1a) |
| 968 | 1119 | D86745 | G, K | nuclear receptor subfamily 0, group B, member 2 | nuclear receptor subfamily 0, group B, member 2 |
| 945 | 1120 | D88666 | N | phosphatidylserine-specific phospholipase A1 | phosphatidylserine-specific phospholipase A1 |
| 25315 | 1121 | D89730 | N | | |
| 3987 | 1122 | D90258 | M, N | proteasome (prosome, macropain) subunit, alpha type 3 | proteasome (prosome, macropain) subunit, alpha type 3 |
| 1921 | 1123 | E01524 | N | P450 (cytochrome) oxidoreductase | P450 (cytochrome) oxidoreductase |
| 25024 | 1124 | E03229 | N | cytosolic cysteine dioxygenase 1 | cytosolic cysteine dioxygenase 1 |
| 19824 | 1125 | E13557 | N, G, K | cysteine-sulfinate decarboxylase | cysteine-sulfinate decarboxylase |
| 4360 | 1126 | H31813 | M, G, I | | Rattus norvegicus transcribed sequence with strong similarity to protein |
| | | | | | pir: T14781 (H. sapiens) T14781 hypothetical protein DKFZp586B1621.1 - |
| | | | | | human (fragment) |
| 4361 | 1127 | H31839 | N | BCL2-antagonist/killer 1 | BCL2-antagonist/killer 1 |
| 21011 | 1128 | H32189 | N | glutathione S-transferase, mu 1 | glutathione S-transferase, mu 1 |
| 4386 | 1129 | H33093 | N | | Rattus norvegicus transcribed sequences |
| 24033 | 1130 | H33101 | H | | Rattus norvegicus transcribed sequence with moderate similarity to protein |
| | | | | | ref: NP_219480.1 (H. sapiens) hypothetical protein similar to CG7943 [Homo |
| | | | | | sapiens] |
| 17159 | 1131 | J00797 | M, G, K | alpha-tubulin | alpha-tubulin |
| 1301 | 1132 | J02585 | N | stearoyl-Coenzyme A desaturase 1 | stearoyl-Coenzyme A desaturase 1 |
| 21012 | 1133 | J02592 | N, B | Glutathione-S-transferase, mu type 2 (Yb2) | Glutathione-S-transferase, mu type 2 (Yb2) |
| 15124 | 1134 | J02612 | N, B | (UDP glycosyltransferase 1 family, polypeptide A1, | (UDP glycosyltransferase 1 family, polypeptide A1, UDP glycosyltransferase 1 |
| | | | | UDP glycosyltransferase 1 family, polypeptide A6, UDP | family, polypeptide A6, UDP glycosyltransferase 1 family, polypeptide A7, |
| | | | | glycosyltransferase 1 family, polypeptide A7, UDP- | UDP-glucuronosyltransferase 1A8) |
| | | | | glucuronosyltransferase 1A8) | |
| 4592 | 1135 | J02646 | H | eukaryotic translation initiation factor 2, subunit 1 (alpha) | eukaryotic translation initiation factor 2, subunit 1 (alpha) |
| 1174 | 1136 | J02657 | N | Cytochrome P450, subfamily IIC (mephenytoin 4- | Cytochrome P450, subfamily IIC (mephenytoin 4-hydroxylase) |
| | | | | hydroxylase) | |
| 1698 | 1137 | J02679 | M, B, H, I | NAD(P)H dehydrogenase, quinone 1 | NAD(P)H dehydrogenase, quinone 1 |
| 16080 | 1138 | J02722 | N | Heme oxygenase | Heme oxygenase |
| 23698 | 1139 | J02749 | N, D | acetyl-Coenzyme A acyltransferase 1 (peroxisomal 3- | acetyl-Coenzyme A acyltransferase 1 (peroxisomal 3-oxoacyl-Coenzyme A |
| | | | | oxoacyl-Coenzyme A thiolase) | thiolase) |
| 23699 | 1139 | J02749 | N, D, E | acetyl-Coenzyme A acyltransferase 1 (peroxisomal 3- | acetyl-Coenzyme A acyltransferase 1 (peroxisomal 3-oxoacyl-Coenzyme A |
| | | | | oxoacyl-Coenzyme A thiolase) | thiolase) |
| 16148 | 1140 | J02752 | N | acyl-coA oxidase | acyl-coA oxidase |
| 16476 | 1141 | J02773 | M, L | fatty acid binding protein 3 | fatty acid binding protein 3 |
| 1514 | 1142 | J02780 | N | Tropomycin 4 | Tropomycin 4 |
| 21078 | 1143 | J02791 | N, G | acetyl-coenzyme A dehydrogenase, medium chain | acetyl-coenzyme A dehydrogenase, medium chain |
| 21013 | 1144 | J02810 | N | glutathione S-transferase, mu 1 | glutathione S-transferase, mu 1 |
| 17284 | 1145 | J02827 | N, G | branched chain keto acid dehydrogenase subunit E1, | branched chain keto acid dehydrogenase subunit E1, alpha polypeptide |
| | | | | alpha polypeptide | |
| 17285 | 1145 | J02827 | N | branched chain keto acid dehydrogenase subunit E1, | branched chain keto acid dehydrogenase subunit E1, alpha polypeptide |
| | | | | alpha polypeptide | |
| 22321 | 1146 | J02962 | M, B, G, L | lectin, galactose binding, soluble 3 | lectin, galactose binding, soluble 3 |
| 1762 | 1147 | J03179 | N | D site albumin promoter binding protein | D site albumin promoter binding protein |
| 1763 | 1147 | J03179 | N | D site albumin promoter binding protein | D site albumin promoter binding protein |
| 21038 | 1148 | J03190 | H | aminolevulinic acid synthase 1 | aminolevulinic acid synthase 1 |
| 21039 | 1148 | J03190 | H | aminolevulinic acid synthase 1 | aminolevulinic acid synthase 1 |
| 13479 | 1149 | J03481 | N | quinoid dihydropteridine reductase | quinoid dihydropteridine reductase |
| 13480 | 1149 | J03481 | N | quinoid dihydropteridine reductase | quinoid dihydropteridine reductase |
| 14997 | 1150 | J03572 | N | alkaline phosphatase, tissue-nonspecific | alkaline phosphatase, tissue-nonspecific |
| 16948 | 1151 | J03588 | N, A, C | Guanidinoacetate methyltransferase | Guanidinoacetate methyltransferase |
| 19040 | 1152 | J03627 | M, C, G, K | S100 calcium binding protein A10 (calpactin) | S100 calcium binding protein A10 (calpactin) |
| 15017 | 1153 | J03752 | N, B | microsomal glutathione S-transferase 1 | microsomal glutathione S-transferase 1 |
| 24459 | 1154 | J03886 | C | myosin light chain kinase 2, skeletal muscle | myosin light chain kinase 2, skeletal muscle |
| 21014 | 1155 | J03914 | B, L | Glutathione-S-transferase, mu type 2 (Yb2) | Glutathione-S-transferase, mu type 2 (Yb2) |
| 17394 | 1156 | J03969 | M, N, L | nucleophosmin 1 | nucleophosmin 1 |
| 7784 | 1157 | J04591 | M, N, I | Dipeptidyl peptidase 4 | Dipeptidyl peptidase 4 |
| 23524 | 1158 | J04792 | N | | |
| 17393 | 1159 | J04943 | M, N | nucleophosmin 1 | nucleophosmin 1 |
| 6780 | 1160 | J05029 | N | acetyl-Coenzyme A dehydrogenase, long-chain | acetyl-Coenzyme A dehydrogenase, long-chain |
| 4450 | 1161 | J05031 | N, E | Isovaleryl Coenzyme A dehydrogenase | Isovaleryl Coenzyme A dehydrogenase |
| 4451 | 1161 | J05031 | M, N, F | Isovaleryl Coenzyme A dehydrogenase | Isovaleryl Coenzyme A dehydrogenase |
| 15125 | 1162 | J05132 | N, B | (UDP glycosyltransferase 1 family, polypeptide A1, | (UDP glycosyltransferase 1 family, polypeptide A1, UDP glycosyltransferase 1 |
| | | | | UDP glycosyltransferase 1 family, polypeptide A6, UDP | family, polypeptide A6, UDP glycosyltransferase 1 family, polypeptide A7, |
| | | | | glycosyltransferase 1 family, polypeptide A7, UDP- | UDP-glucuronosyltransferase 1A8) |
| | | | | glucuronosyltransferase 1A8) | |
| 1247 | 1163 | J05181 | N, J | glutamate-cysteine ligase catalytic subunit | glutamate-cysteine ligase catalytic subunit |
| 1977 | 1164 | J05470 | N, L | Carnitine palmitoyltransferase 2 | Carnitine palmitoyltransferase 2 |
| 10464 | 1165 | J05510 | M, I | inositol 1,4,5-triphosphate receptor 1 | inositol 1,4,5-triphosphate receptor 1 |
| 1549 | 1166 | J05519 | G | C1-tetrahydrofolate synthase | C1-tetrahydrofolate synthase |
| 24563 | 1167 | J05592 | N, G, K | protein phosphatase 1, regulatory (inhibitor) subunit 1A | protein phosphatase 1, regulatory (inhibitor) subunit 1A |
| 24564 | 1167 | J05592 | N, G, K | protein phosphatase 1, regulatory (inhibitor) subunit 1A | protein phosphatase 1, regulatory (inhibitor) subunit 1A |
| 18989 | 1168 | K00136 | N | glutathione-S-transferase, alpha type2 | glutathione-S-transferase, alpha type2 |
| 11136 | 1169 | K00750 | J | | |
| 11137 | 1169 | K00750 | J | | |
| 634 | 1170 | K01932 | N | glutathione S-transferase, alpha 1 | glutathione S-transferase, alpha 1 |
| 1850 | 1171 | K02814 | M | T-kininogen | T-kininogen |
| 20149 | 1172 | K03243 | N, F | | |
| 17758 | 1173 | K03249 | N | enoyl-Coenzyme A, hydratase/3-hydroxyacyl | enoyl-Coenzyme A, hydratase/3-hydroxyacyl Coenzyme A dehydrogenase |
| | | | | Coenzyme A dehydrogenase | |
| 10878 | 1174 | K03250 | N | ribosomal protein S11 | ribosomal protein S11 |
| 20865 | 1175 | L00117 | M, N | Elastase 1 | Elastase 1 |
| 1894 | 1176 | L03201 | N, B, L | cathepsin S | cathepsin S |
| 1712 | 1177 | L06096 | M | inositol 1,4,5-triphosphate receptor 3 | inosital 1,4,5-triphosphate receptor 3 |
| 15411 | 1178 | L07736 | N, B, L | carnitine palmitoyltransferase 1 | carnitine palmitoyltransferase 1 |
| 617 | 1179 | L08831 | N | Glucose-dependent insulinotropic peptide | Glucose-dependent insulinotropic peptide |
| 8984 | 1180 | L10652 | D | methionine aminopeptidase 2 | methionine aminopeptidase 2 |
| 3549 | 1181 | L11319 | N | signal peptidase complex 18 kD | signal peptidase complex 18 kD |
| 574 | 1182 | L13039 | M, E, G, K | calpactin I heavy chain | calpactin I heavy chain |
| 25364 | 1183 | L13237 | F | | |
| 22412 | 1184 | L13619 | N, C, H | growth response protein (CL-6) | growth response protein (CL-6) |
| 22413 | 1184 | L13619 | N, C, H | growth response protein (CL-6) | growth response protein (CL-6) |
| 108 | 1185 | L14002 | J | Polymeric immunoglobulin receptor | Polymeric immunoglobulin receptor |
| 25366 | 1186 | L14003 | J | | |
| 109 | 1187 | L14004 | N | Polymeric immunoglobulin receptor | Polymeric immunoglobulin receptor |
| 20414 | 1188 | L14323 | M | Phospholipase C-beta1 | Phospholipase C-beta1 |
| 2079 | 1189 | L14462 | F | amino-terminal enhancer of split | amino-terminal enhancer of split |
| 1475 | 1190 | L16764 | N, C | heat shock 70 kD protein 1A | heat shock 70 kD protein 1A |
| 24770 | 1191 | L19031 | M, N, G, I, J | solute carrier family 21, member 1 | solute carrier family 21, member 1 |
| 4748 | 1192 | L19998 | N | sulfotransferase family 1A, phenol-preferring, member 1 | sulfotransferase family 1A, phenol-preferring, member 1 |
| 4749 | 1192 | L19998 | N, L | sulfotransferase family 1A, phenol-preferring, member 1 | sulfotransferase family 1A, phenol-preferring, member 1 |
| 10248 | 1193 | L23148 | N | Inhibitor of DNA binding 1, helix-loop-helix protein | Inhibitor of DNA binding 1, helix-loop-helix protein (splice variation) |
| | | | | (splice variation) | |
| 43 | 1194 | L23413 | N | solute carrier family 26 (sulfate transporter), member 1 | solute carrier family 26 (sulfate transporter), member 1 |
| 25377 | 1195 | L25387 | D | phosphofructokinase, platelet | |
| 17401 | 1196 | L25785 | M, B, G | Transforming growth factor beta stimulated clone 22 | Transforming growth factor beta stimulated clone 22 |
| 19 | 1197 | L26268 | M | B-cell translocation gene 1 | B-cell translocation gene 1 |
| 22411 | 1198 | L26292 | N | Kruppel-like factor 4 (gut) | Kruppel-like factor 4 (gut) |
| 25379 | 1198 | L26292 | M, C | Kruppel-like factor 4 (gut) | Kruppel-like factor 4 (gut) |
| 605 | 1199 | L27340 | C | sonic hedgehog homolog (Drosophila) | sonic hedgehog homolog (Drosophila) |
| 24219 | 1200 | L27843 | M, L | protein tyrosine phosphatase 4a1 | protein tyrosine phosphatase 4a1 |
| 15872 | 1201 | L28135 | N | solute carrier family 2, member 2 | solute carrier family 2, member 2 |
| 20458 | 1202 | L31394 | M, I, K, L | parathyroid hormone receptor | parathyroid hormone receptor |
| 353 | 1203 | L32591 | M, H, I | growth arrest and DNA-damage-inducible 45 alpha | growth arrest and DNA-damage-inducible 45 alpha |
| 354 | 1203 | L32591 | M, H, I | growth arrest and DNA-damage-inducible 45 alpha | growth arrest and DNA-damage-inducible 45 alpha |
| 16520 | 1204 | L33869 | M, B, C, L | ceruloplasmin | ceruloplasmin |
| 15111 | 1205 | L34049 | M, I | low density lipoprotein receptor-related protein 2 | low density lipoprotein receptor-related protein 2 |
| 15112 | 1205 | L34049 | N, I | low density lipoprotein receptor-related protein 2 | low density lipoprotein receptor-related protein 2 |
| 1321 | 1206 | L37333 | N | glucose-6-phosphatase, catalytic | glucose-6-phosphatase, catalytic |
| 13682 | 1207 | L38482 | N | | |
| 6405 | 1208 | L38615 | G | glutathione synthetase | glutathione synthetase |
| 6406 | 1208 | L38615 | N | glutathione synthetase | glutathione synthetase |
| 1427 | 1209 | L38644 | N | karyopherin, beta 1 | karyopherin, beta 1 |
| 18629 | 1210 | L40362 | G | RT1 class lb gene | RT1 class lb gene |
| 24568 | 1211 | L48060 | M, B | prolactin receptor | prolactin receptor |
| 11955 | 1212 | L48209 | N | cytochrome c oxidase, subunit VIIIa | cytochrome c oxidase, subunit VIIIa |
| 1920 | 1213 | M10068 | N | P450 (cytochrome) oxidoreductase | P450 (cytochrome) oxidoreductase |
| 15741 | 1214 | M11670 | N | Catalase | Catalase |
| 15189 | 1215 | M11794 | N, B | Metallothionein | Metallothionein |
| 17765 | 1216 | M11942 | N | heat shock protein 8 | heat shock protein 8 |
| 17502 | 1217 | M12156 | N | heterogeneous nuclear ribonucleoprotein A1 | heterogeneous nuclear ribonucleoprotein A1 |
| 6055 | 1218 | M12337 | M, N, D | Phenylalanine hydroxylase | Phenylalanine hydroxylase |
| 4254 | 1219 | M12450 | N | Group-specific component (vitamin D-binding protein) | Group-specific component (vitamin D-binding protein) |
| 7064 | 1220 | M12919 | N | aldolase A | aldolase A |
| 25399 | 1221 | M13101 | F | | |
| 1466 | 1222 | M14050 | N | heat shock 70 kD protein 5 | heat shock 70 kD protein 5 |
| 23651 | 1223 | M14656 | M, G, K | secreted phosphoprotein 1 | secreted phosphoprotein 1 |
| 20714 | 1224 | M14972 | J, L | | |
| 455 | 1225 | M15474 | N, E | tropomyosin 1, alpha | tropomyosin 1, alpha |
| 21053 | 1226 | M15481 | M | insulin-like growth factor 1 | insulin-like growth factor 1 |
| 19255 | 1227 | M15562 | N | | Rat MHC class II RT1.u-D-alpha chain mRNA, 3′ end |
| 19256 | 1227 | M15562 | N | | Rat MHC class II RT1.u-D-alpha chain mRNA, 3′ end |
| 17154 | 1228 | M15883 | J | clathrin, light polypeptide (Lcb) | clathrin, light polypeptide (Lcb) |
| 20809 | 1229 | M17069 | N, D | Calmodulin 2 (phosphorylase kinase, delta) | Calmodulin 2 (phosphorylase kinase, delta) |
| 25405 | 1230 | M18330 | N | protein kinase C, delta | protein kinase C, delta |
| 23872 | 1231 | M18416 | M | early growth response 1 | early growth response 1 |
| 17274 | 1232 | M18854 | J | | Rat T-cell receptor active beta-chain C-region mRNA, partial cds, clone TRB4 |
| 23806 | 1233 | M19257 | D | Retinol-binding protein 1 | Retinol-binding protein 1 |
| 24567 | 1234 | M19304 | N, F | prolactin receptor | prolactin receptor |
| 17197 | 1235 | M19647 | N | | |
| 17198 | 1235 | M19647 | N, G | kallikrein 1 | kallikrein 1 |
| 25415 | 1236 | M19648 | G | | |
| 4010 | 1237 | M20131 | N | | |
| 20876 | 1238 | M21060 | J | superoxide dismutase 1 | superoxide dismutase 1 |
| 24437 | 1239 | M22357 | A | Myelin-associated glycoprotein | Myelin-associated glycoprotein |
| 20481 | 1240 | M22631 | M, N, G, K | Propionyl Coenzyme A carboxylase, alpha polypeptide | Propionyl Coenzyme A carboxylase, alpha polypeptide |
| 25419 | 1241 | M22922 | G | | |
| 46 | 1242 | M23697 | N | Plasminogen activator, tissue | Plasminogen activator, tissue |
| 15540 | 1243 | M24067 | K | serine (or cysteine) proteinase inhibitor, member 1 | serine (or cysteine) proteinase inhibitor, member 1 |
| 18619 | 1244 | M24324 | N | RT1 class Ib gene | RT1 class Ib gene |
| 11454 | 1245 | M24604 | M | Proliferating cell nuclear antigen | Proliferating cell nuclear antigen |
| 11455 | 1245 | M24604 | M | Proliferating cell nuclear antigen | Proliferating cell nuclear antigen |
| 1540 | 1246 | M25073 | N | alanyl (membrane) aminopeptidase | alanyl (membrane) aminopeptidase |
| 17541 | 1247 | M26125 | M, N, A, B, H, I | epoxide hydrolase 1 | epoxide hydrolase 1 |
| 16245 | 1248 | M26534 | G | | |
| 23225 | 1249 | M27467 | N | cytochrome oxidase subunit VIc | cytochrome oxidase subunit VIc |
| 11956 | 1250 | M28255 | N | cytochrome c oxidase, subunit VIIIa | cytochrome c oxidase, subunit VIIIa |
| 17104 | 1251 | M29358 | M, G | ribosomal protein S6 | ribosomal protein S6 |
| 17105 | 1251 | M29358 | N | ribosomal protein S6 | ribosomal protein S6 |
| 14346 | 1252 | M31109 | N, B, H | UDP-glucuronosyltransferase 2B3 precursor, | UDP-glucuronosyltransferase 2B3 precursor, microsomal |
| | | | | microsomal | |
| 1814 | 1253 | M31174 | N | thyroid hormone receptor alpha | thyroid hormone receptor alpha |
| 18501 | 1254 | M31178 | N | calbindin 1 | calbindin 1 |
| 18502 | 1254 | M31178 | N, G, J | calbindin 1 | calbindin 1 |
| 1312 | 1255 | M31788 | J | phosphoglycerate kinase 1 | phosphoglycerate kinase 1 |
| 20868 | 1256 | M32062 | N | Fc receptor, IgG, low affinity III | Fc receptor, IgG, low affinity III |
| 20869 | 1256 | M32062 | N | Fc receptor, IgG, low affinity III | Fc receptor, IgG, low affinity III |
| 20298 | 1257 | M32783 | N, I | | |
| 15580 | 1258 | M33648 | N | 3-hydroxy-3-methylglutaryl-Coenzyme A synthase 2 | 3-hydroxy-3-methylglutaryl-Coenzyme A synthase 2 |
| 11755 | 1259 | M33746 | N, B, H | UDP-glucuronosyltransferase 2 family, member 5 | UDP-glucuronosyltransferase 2 family, member 5 |
| 35 | 1260 | M33822 | C | gamma-glutamyl transpeptidase | gamma-glutamyl transpeptidase |
| 1844 | 1261 | M33962 | J | protein tyrosine phosphatase, non-receptor type 1 | protein tyrosine phosphatase, non-receptor type 1 |
| 24672 | 1262 | M34097 | C | granzyme B | granzyme B |
| 20126 | 1263 | M34253 | N, K | Interferon regulatory factor 1 | Interferon regulatory factor 1 |
| 24590 | 1264 | M35299 | N, D | serine protease inhibitor, Kazal type 1 | serine protease inhibitor, Kazal type 1 |
| 20699 | 1265 | M35601 | N | Fibrinogen, A alpha polypeptide | Fibrinogen, A alpha polypeptide |
| 20700 | 1265 | M35601 | N | Fibrinogen, A alpha polypeptide | Fibrinogen, A alpha polypeptide |
| 21400 | 1266 | M36410 | C, F | sepiapterin reductase | sepiapterin reductase |
| 17661 | 1267 | M37584 | N, E | H2A histone family, member Z | H2A histone family, member Z |
| 67 | 1268 | M37828 | B | cytochrome P450, 4a12 | cytochrome P450, 4a12 |
| 9109 | 1269 | M38135 | N | Cathepsin H | Cathepsin H |
| 17807 | 1270 | M54926 | M, G | lactate dehydrogenase A | lactate dehydrogenase A |
| 8829 | 1271 | M55015 | M, A, F, K | Nucleolin | Nucleolin |
| 13723 | 1272 | M55534 | N, K | crystallin, alpha B | crystallin, alpha B |
| 1246 | 1273 | M57507 | M, J | guanylate cyclase, soluble, beta 2 | guanylate cyclase, soluble, beta 2 |
| 4467 | 1274 | M57664 | N | creatine kinase, brain | creatine kinase, brain |
| 20713 | 1275 | M57718 | N, J, L | cytochrome P450, 4A1 | cytochrome P450, 4A1 |
| 20816 | 1276 | M58404 | M, G, K | thymosin, beta 10 | thymosin, beta 10 |
| 25057 | 1277 | M58495 | N | | |
| 16982 | 1278 | M58634 | M, B, L | insulin-like growth factor binding protein 1 | insulin-like growth factor binding protein 1 |
| 20841 | 1279 | M58758 | H | ATPase, H+ transporting, lysosomal noncatalytic | ATPase, H+ transporting, lysosomal noncatalytic accessory protein 1a |
| | | | | accessory protein 1a | |
| 2465 | 1280 | M59814 | G, K | Eph receptor B2 | Eph receptor B2 |
| 12606 | 1281 | M59861 | N, E, K | 10-formyltetrahydrofolate dehydrogenase | 10-formyltetrahydrofolate dehydrogenase |
| 457 | 1282 | M60666 | E, G, K | tropomyosin 1, alpha | tropomyosin 1, alpha |
| 15300 | 1283 | M60921 | M | B-cell translocation gene 2 | B-cell translocation gene 2 |
| 17378 | 1284 | M62388 | N, D | ubiquitin conjugating enzyme | ubiquitin conjugating enzyme |
| 24431 | 1285 | M63282 | M, F | Activating transcription factor 3 | Activating transcription factor 3 |
| 14956 | 1286 | M64301 | N | mitogen-activated protein kinase 6 | mitogen-activated protein kinase 6 |
| 14957 | 1286 | M64301 | N | mitogen-activated protein kinase 6 | mitogen-activated protein kinase 6 |
| 7101 | 1287 | M64733 | M, E | clusterin | clusterin |
| 19825 | 1288 | M64755 | N | cysteine-sulfinate decarboxylase | cysteine-sulfinate decarboxylase |
| 19110 | 1289 | M64986 | A, J | high mobility group box 1 | high mobility group box 1 |
| 21683 | 1290 | M65149 | M, C, I, L | CCAAT/enhancerbinding, protein (C/EBP) delta | CCAAT/enhancerbinding, protein (C/EBP) delta |
| 21193 | 1291 | M69055 | F | Insulin-like growth factor binding protein 6 | |
| 17301 | 1292 | M69246 | N, E, I | serine (or cysteine) proteinase inhibitor, clade H, | serine (or cysteine) proteinase inhibitor, clade H, member 1 |
| | | | | member 1 | |
| 23884 | 1293 | M73714 | J | aldehyde dehydrogenase family 3, subfamily A2 | aldehyde dehydrogenase family 3, subfamily A2 |
| 24648 | 1294 | M74054 | M, N | angiotensin receptor 1a | angiotensin receptor 1a |
| 20405 | 1295 | M74067 | N, B | claudin 3 | claudin 3 |
| 24566 | 1296 | M74152 | B, F, L | prolactin receptor | prolactin receptor |
| 240 | 1297 | M75153 | N | RAB11a, member RAS oncogene family | RAB11a, member RAS oncogene family |
| 23961 | 1298 | M77694 | M, N, E, G, I | fumarylacetoacetate hydrolase | fumarylacetoacetate hydrolase |
| 1527 | 1299 | M77850 | B | 6-pyruvoyl-tetrahydropterin synthase | 6-pyruvoyl-tetrahydropterin synthase |
| 1622 | 1300 | M80804 | N | solute carrier family 3, member 1 | solute carrier family 3, member 1 |
| 24843 | 1301 | M80826 | N, J | trefoil factor 3 | trefoil factor 3 |
| 1529 | 1302 | M81687 | M, B, F, I | syndecan 2 | syndecan 2 |
| 5733 | 1303 | M81855 | N | (ATP-binding cassette, sub-family B (MDR/TAP), | (ATP-binding cassette, sub-family B (MDR/TAP), member 1A, P- |
| | | | | member 1A, P-glycoprotein/multidrug resistance 1) | glycoprotein/multidrug resistance 1) |
| 17149 | 1304 | M83107 | N | Transgelin (Smooth muscle 22 protein) | Transgelin (Smooth muscle 22 protein) |
| 17150 | 1304 | M83107 | N | Transgelin (Smooth muscle 22 protein) | Transgelin (Smooth muscle 22 protein) |
| 4198 | 1305 | M83143 | M, N, I | Sialyltransferase 1 (beta-galactoside alpha-2,6- | Sialyltransferase 1 (beta-galactoside alpha-2,6-sialytransferase) |
| | | | | sialytransferase) | |
| 4199 | 1305 | M83143 | M, N | Sialyltransferase 1 (beta-galactoside alpha-2,6- | Sialyltransferase 1 (beta-galactoside alpha-2,6-sialytransferase) |
| | | | | sialytransferase) | |
| 24651 | 1306 | M83678 | N | RAB13 | RAB13 |
| 20831 | 1307 | M83680 | B | GTPase Rab14 | GTPase Rab14 |
| 21882 | 1308 | M83740 | M, N, D | 6-pyruvoyl-tetrahydropterin synthase/dimerization | 6-pyruvoyl-tetrahydropterin synthase/dimerization cofactor of hepatocyte |
| | | | | cofactor of hepatocyte nuclear factor 1 alpha | nuclear factor 1 alpha |
| 1430 | 1309 | M84648 | M | dopa decarboxylase | dopa decarboxylase |
| 23445 | 1310 | M84719 | M, N | Flavin-containing monooxygenase 1 | Flavin-containing monooxygenase 1 |
| 24438 | 1311 | M85183 | M, N, F, L | angiotensin/vasopressin receptor | angiotensin/vasopressin receptor |
| 24496 | 1312 | M85300 | M, N, I, K | solute carrier family 9, member 3 | solute carrier family 9, member 3 |
| 16895 | 1313 | M86240 | N | fructose-1,6-biphosphatase 1 | fructose-1,6-biphosphatase 1 |
| 17736 | 1314 | M86389 | H, K | heat shock 27 kDa protein 1 | heat shock 27 kDa protein 1 |
| 7872 | 1315 | M86912 | M, N, B | | |
| 25453 | 1315 | M86912 | M, L | | |
| 291 | 1316 | M88347 | M, N, F | Cystathionine beta synthase | Cystathionine beta synthase |
| 17357 | 1317 | M88601 | M, F, G, I, L | Meprin 1 beta | Meprin 1 beta |
| 24615 | 1318 | M89646 | N, D | ribosomal protein S24 | ribosomal protein S24 |
| 15069 | 1319 | M89945 | H | farensyl diphosphate synthase | farensyl diphosphate synthase |
| 25460 | 1319 | M89945 | N | farensyl diphosphate synthase | farensyl diphosphate synthase |
| 11153 | 1320 | M91652 | N | glutamine synthetase 1 | glutamine synthetase 1 |
| 25467 | 1321 | M93297 | N, G | ornithine aminotransferase | ornithine aminotransferase |
| 17269 | 1322 | M93401 | M | methylmalonate semialdehyde dehydrogenase gene | methylmalonate semialdehyde dehydrogenase gene |
| 20716 | 1323 | M94548 | G | cytochrome P450, subfamily IVF, polypeptide 14 | cytochrome P450, subfamily IVF, polypeptide 14 (leukotriene B4 omega |
| | | | | (leukotriene B4 omega hydroxylase) | hydroxylase) |
| 25468 | 1324 | M94918 | N, J | hemoglobin beta chain complex | hemoglobin beta chain complex |
| 25469 | 1325 | M94919 | N, J | | |
| 1976 | 1326 | M95493 | N | guanylate cyclase activator 2A | guanylate cyclase activator 2A |
| 16449 | 1327 | M95591 | N | farnesyl diphosphate farnesyl transferase 1 | farnesyl diphosphate farnesyl transferase 1 |
| 16450 | 1327 | M95591 | N | farnesyl diphosphate farnesyl transferase 1 | farnesyl diphosphate farnesyl transferase 1 |
| 729 | 1328 | M95762 | N, D | solute carrier family 6 (neurotransmitter transporter, | solute carrier family 6 (neurotransmitter transporter, GABA), member 13 |
| | | | | GABA), member 13 | |
| 25470 | 1329 | M95791 | E | | |
| 1410 | 1330 | M96548 | H | zinc finger protein 354A | zinc finger protein 354A |
| 1678 | 1331 | M96674 | N | glucagon receptor | glucagon receptor |
| 1508 | 1332 | M97662 | N, G | ureidopropionase, beta | ureidopropionase, beta |
| 22434 | 1333 | NM_012974 | F | Laminin chain beta 2 | Laminin chain beta 2 |
| 21145 | 1334 | NM_013032 | M, B | solute carrier family 1, member 1 | solute carrier family 1, member 1 |
| 23708 | 1335 | NM_013113 | N | ATPase Na+/K+ transporting beta 1 polypeptide | ATPase Na+/K+ transporting beta 1 polypeptide |
| 754 | 1336 | NM_013126 | N | diacylglycerol kinase, gamma | diacylglycerol kinase, gamma |
| 16967 | 1337 | NM_013146 | E | Caldesmon 1 | Caldesmon 1 |
| 1946 | 1338 | NM_017061 | F | lysyl oxidase | lysyl oxidase |
| 13938 | 1339 | NM_017212 | N | microtubule-associated protein tau | microtubule-associated protein tau |
| 13939 | 1339 | NM_017212 | D | microtubule-associated protein tau | microtubule-associated protein tau |
| 15299 | 1340 | NM_017259 | M, I, J | B-cell translocation gene 2 | B-cell translocation gene 2 |
| 15666 | 1341 | NM_017265 | L | | |
| 15667 | 1341 | NM_017265 | L | | |
| 1729 | 1342 | NM_019147 | N, B | jagged 1 | jagged 1 |
| 1143 | 1343 | NM_019280 | A | gap junction membrane channel protein alpha 5 | gap junction membrane channel protein alpha 5 |
| 235 | 1344 | NM_019347 | C | solute carrier family 14, member 2 | solute carrier family 14, member 2 |
| 18716 | 1345 | NM_020075 | F | eukaryotic initiation factor 5 (eIF-5) | eukaryotic initiation factor 5 (eIF-5) |
| 7690 | 1346 | NM_022284 | M | melanoma antigen, family D, 1 | melanoma antigen, family D, 1 |
| 22414 | 1347 | NM_022392 | H | growth response protein (CL-6) | growth response protein (CL-6) |
| 21024 | 1348 | NM_022599 | M | synaptojanin 2 binding protein | synaptojanin 2 binding protein |
| 15201 | 1349 | NM_031093 | N | | |
| 18008 | 1350 | NM_031588 | N | neuregulin 1 | neuregulin 1 |
| 16003 | 1351 | NM_031757 | C | matrix metalloproteinase 24 (membrane-inserted) | matrix metalloproteinase 24 (membrane-inserted) |
| 16726 | 1352 | NM_031855 | M, N, E, G, H, I | Ketohexokinase | Ketohexokinase |
| 25802 | 1353 | NM_031969 | G, K | Calmodulin 1 (phosphorylase kinase, delta) | Calmodulin 1 (phosphorylase kinase, delta) |
| 1888 | 1354 | NM_057130 | B | BH3 interacting domain 3 | BH3 interacting domain 3 |
| 23033 | 1355 | NM_080888 | A, C, K | BCL2/adenovirus E1B 19 kDa-interacting protein 3-like | BCL2/adenovirus E1B 19 kDa-interacting protein 3-like |
| 23709 | 1356 | NM_138532 | N | (ATPase Na+/K+ transporting beta 1 polypeptide, | (ATPase Na+/K+ transporting beta 1 polypeptide, NME7) |
| | | | | NME7) | |
| 15072 | 1357 | NM_144730 | A | GATA-binding protein 4 | GATA-binding protein 4 |
| 26083 | 1358 | NM_147146 | B, H | | |
| 24232 | 1359 | NM_171992 | B | cyclin D1 | cyclin D1 |
| 20795 | 1360 | NM_175761 | N, H | heat shock protein 86 | heat shock protein 86 |
| 5952 | 1361 | NM_181090 | E | solute carrier family 38, member 2 | solute carrier family 38, member 2 |
| 24762 | 1362 | NM_181092 | M, D | (solute carrier family 7 (cationic amino acid transporter, | (solute carrier family 7 (cationic amino acid transporter, y+ system), member |
| | | | | y+ system), member 8, synaptic Ras GTPase activating | 8, synaptic Ras GTPase activating protein 1) |
| | | | | protein 1) | |
| 5837 | 1363 | S43408 | M, N, F | Meprin 1 alpha | Meprin 1 alpha |
| 5838 | 1363 | S43408 | M, F, G | Meprin 1 alpha | Meprin 1 alpha |
| 25064 | 1364 | S45392 | N, H, K | | |
| 21977 | 1365 | S46785 | A, B | insulin-like growth factor binding protein, acid labile | insulin-like growth factor binding protein, acid labile subunit |
| | | | | subunit | |
| 25480 | 1365 | S46785 | N | insulin-like growth factor binding protein, acid labile | insulin-like growth factor binding protein, acid labile subunit |
| | | | | subunit | |
| 25481 | 1366 | S46798 | N | | |
| 4012 | 1367 | S48325 | N, J | cytochrome P450, subfamily 2E, polypeptide 1 | cytochrome P450, subfamily 2E, polypeptide 1 |
| 10886 | 1368 | S49003 | N | | |
| 5493 | 1369 | S56936 | N | UDP glycosyltransferase 1 family, polypeptide A6 | UDP glycosyltransferase 1 family, polypeptide A6 |
| 15127 | 1370 | S56937 | N | (UDP glycosyltransferase 1 family, polypeptide A1, | (UDP glycosyltransferase 1 family, polypeptide A1, UDP glycosyltransferase 1 |
| | | | | UDP glycosyltransferase 1 family, polypeptide A6, UDP | family, polypeptide A6, UDP glycosyltransferase 1 family, polypeptide A7, |
| | | | | glycosyltransferase 1 family, polypeptide A7, UDP- | UDP-glucuronosyltransferase 1A8) |
| | | | | glucuronosyltransferase 1A8) | |
| 7196 | 1371 | S57478 | M, E, G, K | annexin 1 | annexin 1 |
| 8210 | 1372 | S61960 | M | | |
| 3244 | 1373 | S63519 | M | | |
| 14003 | 1374 | S65555 | N, B, J | glutamate cysteine ligase, modifier subunit | glutamate cysteine ligase, modifier subunit |
| 355 | 1375 | S66024 | N | cAMP responsive element modulator | cAMP responsive element modulator |
| 356 | 1375 | S66024 | N | cAMP responsive element modulator | cAMP responsive element modulator |
| 16248 | 1376 | S68135 | N | solute carrier family 2, member 1 | solute carrier family 2, member 1 |
| 15832 | 1377 | S68589 | N | | |
| 1471 | 1378 | S68809 | N | S100 calcium binding protein A1 | |
| 18647 | 1379 | S69316 | N | tumor rejection antigen gp96 | |
| 20740 | 1380 | S69874 | D | fatty acid binding protein 5, epidermal | fatty acid binding protein 5, epidermal |
| 9224 | 1381 | S70011 | N, C | | |
| 25518 | 1381 | S70011 | N | | |
| 15135 | 1382 | S71021 | N, G | ribosomal protein L6 | ribosomal protein L6 |
| 25525 | 1383 | S72505 | N | glutathione S-transferase, alpha 1 | glutathione S-transferase, alpha 1 |
| 18990 | 1384 | S72506 | N, H | | |
| 15137 | 1385 | S73424 | L | macrophage migration inhibitory factor | macrophage migration inhibitory factor |
| 16211 | 1386 | S75960 | N | uromodulin | uromodulin |
| 1460 | 1387 | S76054 | M, A, C, I, K | | |
| 1943 | 1388 | S77494 | N, L | lysyl oxidase | lysyl oxidase |
| 21583 | 1389 | S77900 | N | | |
| 25545 | 1389 | S77900 | N | | |
| 25546 | 1390 | S78154 | N, K | | |
| 25547 | 1391 | S78556 | C | | |
| 25550 | 1392 | S79213 | J | protein phosphatase 1, regulatory (inhibitor) subunit 2 | |
| 10260 | 1393 | S81497 | N | lipase A, lysosomal acid | lipase A, lysosomal acid |
| 25563 | 1393 | S81497 | N | lipase A, lysosomal acid | lipase A, lysosomal acid |
| 14121 | 1394 | S82383 | N, I | tropomyosin isoform 6 | tropomyosin isoform 6 |
| 3609 | 1395 | S82579 | N, F | histamine N-methyltransferase | histamine N-methyltransferase |
| 25069 | 1396 | S82820 | N, H | | |
| 25070 | 1397 | S83279 | M, N | peroxisomal multifunctional enzyme type II | peroxisomal multifunctional enzyme type II |
| 3430 | 1398 | S85184 | M, G, I | | |
| 25567 | 1398 | S85184 | M, I | | |
| 18449 | 1399 | U00926 | H | ATP synthase, H+ transporting, mitochondrial F1 | ATP synthase, H+ transporting, mitochondrial F1 complex, delta subunit |
| | | | | complex, delta subunit | |
| 347 | 1400 | U01914 | D | A kinase anchor protein 8 | A kinase anchor protein 8 |
| 18005 | 1401 | U02320 | N | neuregulin 1 | neuregulin 1 |
| 18011 | 1402 | U02322 | M, H | neuregulin 1 | neuregulin 1 |
| 20885 | 1403 | U04842 | N, G, K | epidermal growth factor | epidermal growth factor |
| 1570 | 1404 | U05014 | A | eukaryotic translation initiation factor 4E binding protein 1 | eukaryotic translation initiation factor 4E binding protein 1 |
| 2010 | 1405 | U05675 | K | Fibrinogen, B beta polypeptide | Fibrinogen, B beta polypeptide |
| 23606 | 1406 | U05784 | N | microtubule-associated proteins 1A/1B light chain 3 | microtubule-associated proteins 1A/1B light chain 3 |
| 17806 | 1407 | U06273 | N | UDP-glucuronosyltransferase | UDP-glucuronosyltransferase |
| 17805 | 1408 | U06274 | N, B | UDP-glucuronosyltransferase | UDP-glucuronosyltransferase |
| 7124 | 1409 | U07181 | E | lactate dehydrogenase B | lactate dehydrogenase B |
| 24874 | 1410 | U07619 | N | coagulation factor 3 | coagulation factor 3 |
| 16775 | 1411 | U07971 | M, D, I, L | glycine amidinotransferase (L-arginine: glycine | glycine amidinotransferase (L-arginine: glycine amidinotransferase) |
| | | | | amidinotransferase) | |
| 20925 | 1412 | U08976 | N, L | enoyl coenzyme A hydratase 1 | enoyl coenzyme A hydratase 1 |
| 20803 | 1413 | U09256 | N, B, H, I | transketolase | transketolase |
| 4532 | 1414 | U10096 | J | solute carrier family 12, member 1 | solute carrier family 12, member 1 |
| 646 | 1415 | U10097 | N, G, K | solute carrier family 12, member 3 | solute carrier family 12, member 3 |
| 714 | 1416 | U10279 | N | solute carrier family 28 (sodium-coupled nucleoside | solute carrier family 28 (sodium-coupled nucleoside transporter), member 1 |
| | | | | transporter), member 1 | |
| 45 | 1417 | U10354 | M, J, L | calcium-sensing receptor | calcium-sensing receptor |
| 1928 | 1418 | U10357 | N | pyruvate dehydrogenase kinase 2 | pyruvate dehydrogenase kinase 2 |
| 1929 | 1418 | U10357 | N, A, C, D, E | pyruvate dehydrogenase kinase 2 | pyruvate dehydrogenase kinase 2 |
| 16268 | 1419 | U10894 | N | (allograft inflammatory factor 1, balloon angioplasty | (allograft inflammatory factor 1, balloon angioplasty responsive transcript) |
| | | | | responsive transcript) | |
| 24900 | 1420 | U12973 | N, H | X transporter protein 2 | X transporter protein 2 |
| 15273 | 1421 | U13177 | E | ubiquitin-conjugating enzyme E2D 3 (homologous to | ubiquitin-conjugating enzyme E2D 3 (homologous to yeast UBC4/5) |
| | | | | yeast UBC4/5) | |
| 20443 | 1422 | U14192 | H | vesicle docking protein, 115 kDa | vesicle docking protein, 115 kDa |
| 1424 | 1423 | U14746 | N | von Hippel-Lindau syndrome homolog | von Hippel-Lindau syndrome homolog |
| 809 | 1424 | U17035 | C | chemokine (C—X—C motif) ligand 10 | chemokine (C—X—C motif) ligand 10 |
| 16674 | 1425 | U17565 | E | mini chromosome maintenance deficient 6 (S. cerevisiae) | mini chromosome maintenance deficient 6 (S. cerevisiae) |
| 16675 | 1425 | U17565 | N, E | mini chromosome maintenance deficient 6 (S. cerevisiae) | mini chromosome maintenance deficient 6 (S. cerevisiae) |
| 9520 | 1426 | U17837 | B | | |
| 1824 | 1427 | U17971 | K | protein tyrosine phosphatase 2E | protein tyrosine phosphatase 2E |
| 16871 | 1428 | U18314 | N, E | thymopoietin | thymopoietin |
| 19712 | 1429 | U18374 | K | nuclear receptor subfamily 1, group H, member 4 | nuclear receptor subfamily 1, group H, member 4 |
| 17999 | 1430 | U19485 | M | spp-24 precursor | spp-24 precursor |
| 18000 | 1430 | U19485 | I | spp-24 precursor | spp-24 precursor |
| 1949 | 1431 | U19614 | A | lamina-associated polypeptide 1C | lamina-associated polypeptide 1C |
| 25589 | 1432 | U21718 | F | hypothetical RNA binding protein RDA288 | hypothetical RNA binding protein RDA288 |
| 22196 | 1433 | U21719 | M, N | | Rattus norvegicus clone D920 intestinal epithelium proliferating cell- |
| | | | | | associated mRNA sequence |
| 275 | 1434 | U22424 | M | hydroxysteroid 11-beta dehydrogenase 2 | hydroxysteroid 11-beta dehydrogenase 2 |
| 1581 | 1435 | U23769 | M, A, C | PDZ and LIM domain 1 | PDZ and LIM domain 1 |
| 133 | 1436 | U24174 | N | cyclin-dependent kinase inhibitor 1A | cyclin-dependent kinase inhibitor 1A |
| 1340 | 1437 | U25651 | B | phosphofructokinase, muscle | phosphofructokinase, muscle |
| 1553 | 1438 | U25808 | J | Kidney androgen-regulated protein | Kidney androgen-regulated protein |
| 20555 | 1439 | U26033 | F | carnitine O-octanoyltransferase | carnitine O-octanoyltransferase |
| 1472 | 1440 | U26356 | K | | |
| 1537 | 1441 | U27518 | N, H | UDP-glucuronosyltransferase | UDP-glucuronosyltransferase |
| 1558 | 1442 | U28504 | N, H | solute carrier family 17 vesicular glutamate transporter), | solute carrier family 17 vesicular glutamate transporter), member 1 |
| | | | | member 1 | |
| 1559 | 1442 | U28504 | N | solute carrier family 17 vesicular glutamate transporter), | solute carrier family 17 vesicular glutamate transporter), member 1 |
| | | | | member 1 | |
| 247 | 1443 | U28938 | J | protein tyrosine phosphatase, receptor type, O | protein tyrosine phosphatase, receptor type, O |
| 20780 | 1444 | U29881 | M, N, D | low affinity Na-dependent glucose transporter (SGLT2) | low affinity Na-dependent glucose transporter (SGLT2) |
| 1598 | 1445 | U30186 | N | DNA-damage inducible transcript 3 | DNA-damage inducible transcript 3 |
| 1970 | 1446 | U31463 | N, K | myosin, heavy polypeptide 9 | myosin, heavy polypeptide 9 |
| 1478 | 1447 | U32314 | M | Pyruvate carboxylase | Pyruvate carboxylase |
| 1479 | 1447 | U32314 | N, D | Pyruvate carboxylase | Pyruvate carboxylase |
| 18301 | 1448 | U33500 | M | | Rattus norvegicus retinol dehydrogenase type II mRNA, complete cds |
| 18302 | 1448 | U33500 | M | | Rattus norvegicus retinol dehydrogenase type II mRNA, complete cds |
| 16552 | 1449 | U36482 | L | endoplasmic retuclum protein 29 | endoplasmic retuclum protein 29 |
| 433 | 1450 | U37142 | C | Brevican | Brevican |
| 23826 | 1451 | U38180 | N | solute carrier family 19, member 1 | solute carrier family 19, member 1 |
| 797 | 1452 | U38253 | N | eukaryotic translation initiation factor 2B, subunit 3 | eukaryotic translation initiation factor 2B, subunit 3 (gamma, 58 kD) |
| | | | | (gamma, 58 kD) | |
| 15851 | 1453 | U42719 | M | complement component 4a | complement component 4a |
| 24484 | 1454 | U42976 | H | cholinergic receptor, nicotinic, beta polypeptide 4 | cholinergic receptor, nicotinic, beta polypeptide 4 |
| 19543 | 1455 | U44948 | N | cysteine rich protein 2 | cysteine rich protein 2 |
| 1453 | 1456 | U48596 | F, K | mitogen activated protein kinase kinase kinase 1 | mitogen activated protein kinase kinase kinase 1 |
| 1454 | 1456 | U48596 | M, K | mitogen activated protein kinase kinase kinase 1 | mitogen activated protein kinase kinase kinase 1 |
| 20829 | 1457 | U49062 | M, D | CD24 antigen | CD24 antigen |
| 20830 | 1457 | U49062 | M | CD24 antigen | CD24 antigen |
| 15489 | 1458 | U50194 | F | tripeptidylpeptidase II | tripeptidylpeptidase II |
| 16147 | 1459 | U51898 | M, N | phospholipase A2, group VI | phospholipase A2, group VI |
| 21654 | 1460 | U53184 | M, I, L | LPS-induced TNF-alpha factor | LPS-induced TNF-alpha factor |
| 25606 | 1461 | U53214 | C | tubulin tyrosine ligase | tubulin tyrosine ligase |
| 12014 | 1462 | U54632 | N | Ubiquitin conjugating enzyme E2I | Ubiquitin conjugating enzyme E2I |
| 699 | 1463 | U55765 | E | serine (or cysteine) proteinase inhibitor, clade A (alpha- | serine (or cysteine) proteinase inhibitor, clade A (alpha-1 antiproteinase, |
| | | | | 1 antiproteinase, antitrypsin), member 10 | antitrypsin), member 10 |
| 989 | 1464 | U56242 | N, D, F | v-maf musculoaponeurotic fibrosarcoma (avian) | v-maf musculoaponeurotic fibrosarcoma (avian) oncogene homolog (c-maf) |
| | | | | oncogene homolog (c-maf) | |
| 16708 | 1465 | U57042 | M, N | adenosine kinase | adenosine kinase |
| 15470 | 1466 | U57050 | H | 26S proteasome, subunit p112 | 26S proteasome, subunit p112 |
| 1439 | 1467 | U57391 | H | SH2-B PH domain containing signaling mediator 1 | SH2-B PH domain containing signaling mediator 1 |
| 912 | 1468 | U59184 | N | bcl2-associated X protein | bcl2-associated X protein |
| 15174 | 1469 | U59809 | N | insulin-like growth factor 2 receptor | insulin-like growth factor 2 receptor |
| 20772 | 1470 | U60882 | N | heterogeneous nuclear ribonucleoproteins | heterogeneous nuclear ribonucleoproteins methyltransferase-like 2 (S. cerevisiae) |
| | | | | methyltransferase-like 2 (S. cerevisiae) | |
| 725 | 1471 | U62316 | B | solute carrier family 16, member 7 | solute carrier family 16, member 7 |
| 15035 | 1472 | U62897 | B | carboxypeptidase D | carboxypeptidase D |
| 1490 | 1473 | U63839 | E | nucleoporin p58 | nucleoporin p58 |
| 24234 | 1474 | U63923 | M, A, I | thioredoxin reductase 1 | thioredoxin reductase 1 |
| 20896 | 1475 | U64030 | A, F | Deoxyuridinetriphosphatase (dUTPase) | Deoxyuridinetriphosphatase (dUTPase) |
| 794 | 1476 | U68168 | M, I | kynureninase (L-kynurenine hydrolase) | kynureninase (L-kynurenine hydrolase) |
| 24643 | 1477 | U68417 | N, K | branched chain aminotransferase 2, mitochondrial | branched chain aminotransferase 2, mitochondrial |
| 16398 | 1478 | U75392 | N | B-cell receptor-associated protein 37 | B-cell receptor-associated protein 37 |
| 23869 | 1479 | U75397 | L | early growth response 1 | early growth response 1 |
| 2153 | 1480 | U75404 | M, L | | Rattus norvegicus Ssecks 322 mRNA, 3′ untranslated region, partial sequence |
| 25632 | 1481 | U75405 | N | collagen, type 1, alpha 1 | collagen, type 1, alpha 1 |
| 20682 | 1482 | U75917 | B | clathrin-associated protein 17 | clathrin-associated protein 17 |
| 1602 | 1483 | U76379 | N | solute carrier family 22, member 1 | solute carrier family 22, member 1 |
| 20886 | 1484 | U76635 | E, G | Deoxyribonuclease I | Deoxyribonuclease I |
| 20887 | 1484 | U76635 | N, E, G | Deoxyribonuclease I | Deoxyribonuclease I |
| 4956 | 1485 | U76714 | H | solute carrier family 39 (iron-regulated transporter), | solute carrier family 39 (iron-regulated transporter), member 1 |
| | | | | member 1 | |
| 4957 | 1485 | U76714 | N | solute carrier family 39 (iron-regulated transporter), | solute carrier family 39 (iron-regulated transporter), member 1 |
| | | | | member 1 | |
| 25643 | 1486 | U77829 | N, A | growth arrest specific 5 | growth arrest specific 5 |
| 25647 | 1487 | U83119 | F | | |
| 23300 | 1488 | U84727 | N | 2-oxoglutarate carrier | 2-oxoglutarate carrier |
| 1546 | 1489 | U85512 | M, N, G | GTP cyclohydrolase I feedback regulatory protein | GTP cyclohydrolase I feedback regulatory protein |
| 15032 | 1490 | U89905 | M, A, H, I, K, L | alpha-methylacyl-CoA racemase | alpha-methylacyl-CoA racemase |
| 23282 | 1491 | U90725 | A | lipoprotein-binding protein | lipoprotein-binding protein |
| 1419 | 1492 | U90887 | N | arginase 2 | arginase 2 |
| 22675 | 1493 | U92081 | N, G | glycoprotein 38 | glycoprotein 38 |
| 1401 | 1494 | U93692 | J | preimplantation protein 2 | preimplantation protein 2 |
| 4504 | 1495 | U95178 | D | disabled homolog 2, mitogen-responsive | disabled homolog 2, mitogen-responsive phosphoprotein (Drosophila) |
| | | | | phosphoprotein (Drosophila) | |
| 17158 | 1496 | V01227 | N | alpha-tubulin | alpha-tubulin |
| 818 | 1497 | X02291 | N | aldolase B | aldolase B |
| 20818 | 1498 | X02904 | M, N | (glutathione S-transferase, pi 2, glutathione-S- | (glutathione S-transferase, pi 2, glutathione-S-transferase, pi 1) |
| | | | | transferase, pi 1) | |
| 14633 | 1499 | X03478 | H | UDP glycosyltransferase 2 family, polypeptide B | UDP glycosyltransferase 2 family, polypeptide B |
| 33 | 1500 | X03518 | N | gamma-glutamyl transpeptidase | gamma-glutamyl transpeptidase |
| 25662 | 1501 | X05472 | F | | |
| 20849 | 1502 | X05566 | M, G, K | myosin regulatory light chain | myosin regulatory light chain |
| 20513 | 1503 | X05684 | N | pyruvate kinase, liver and RBC | pyruvate kinase, liver and RBC |
| 1550 | 1504 | X06150 | N | Glycine methyltransferase | Glycine methyltransferase |
| 1551 | 1504 | X06150 | N, G | Glycine methyltransferase | Glycine methyltransferase |
| 16204 | 1505 | X06423 | M, N, G | ribosomal protein S8 | ribosomal protein S8 |
| 16205 | 1505 | X06423 | N, F | ribosomal protein S8 | ribosomal protein S8 |
| 6577 | 1506 | X06942 | F | A-raf | A-raf |
| 20715 | 1507 | X07259 | N, L | cytochrome P450,4A1 | cytochrome P450,4A1 |
| 1399 | 1508 | X07467 | M, H, I | glucose-6-phosphate dehydrogenase | glucose-6-phosphate dehydrogenase |
| 23523 | 1509 | X07944 | N | ornithine decarboxylase 1 | ornithine decarboxylase 1 |
| 16947 | 1510 | X08056 | N | Guanidinoacetate methyltransferase | Guanidinoacetate methyltransferase |
| 1853 | 1511 | X12367 | N | Glutathione peroxidase 1 | |
| 20597 | 1512 | X12459 | N | arginosuccinate synthetase | arginosuccinate synthetase |
| 20884 | 1513 | X12748 | N, G, K | epidermal growth factor | epidermal growth factor |
| 17377 | 1514 | X13058 | N | tumor protein p53 | tumor protein p53 |
| 24778 | 1515 | X13119 | N | serine dehydratase | serine dehydratase |
| 16847 | 1516 | X13549 | N | ribosomal protein S10 | ribosomal protein S10 |
| 20810 | 1517 | X14181 | N, G | | |
| 25675 | 1517 | X14181 | N | | |
| 15653 | 1518 | X14210 | N, G | ribosomal protein S4, X-linked | |
| 25676 | 1519 | X14254 | N | | |
| 20518 | 1520 | X14265 | N | calmodulin 3 | calmodulin 3 |
| 19244 | 1521 | X15013 | N | | |
| 1069 | 1522 | X15096 | N | acidic ribosomal protein P0 | acidic ribosomal protein P0 |
| 20167 | 1523 | X15705 | E | testis-specific heat shock protein-related gene hst70 | testis-specific heat shock protein-related gene hst70 |
| 20483 | 1524 | X15939 | N | myosin heavy chain, polypeptide 7 | myosin heavy chain, polypeptide 7 |
| 21562 | 1525 | X15958 | N, A | enoyl Coenzyme A hydratase, short chain 1 | enoyl Coenzyme A hydratase, short chain 1 |
| 14996 | 1526 | X16038 | M, D | alkaline phosphatase, tissue-nonspecific | alkaline phosphatase, tissue-nonspecific |
| 3202 | 1527 | X16043 | N | Protein phosphatase 2 (formerly 2A), catalytic subunit, | Protein phosphatase 2 (formerly 2A), catalytic subunit, alpha isoform |
| | | | | alpha isoform | |
| 24582 | 1528 | X16554 | D | phosphoribosyl pyrophosphate synthetase 1 | phosphoribosyl pyrophosphate synthetase 1 |
| 1847 | 1529 | X16555 | B | phosphoribosyl pyrophosphate synthetase 2 | phosphoribosyl pyrophosphate synthetase 2 |
| 25682 | 1530 | X16933 | N | RNA binding protein p45AUF1 | RNA binding protein p45AUF1 |
| 20449 | 1531 | X17053 | M | small inducible cytokine A2 | small inducible cytokine A2 |
| 25686 | 1532 | X51536 | N, F | ribosomal protein S3 | |
| 23987 | 1533 | X51615 | N, B | | |
| 20872 | 1534 | X51707 | N | ribosomal protein S19 | |
| 9620 | 1535 | X53377 | N | ribosomal protein S7 | ribosomal protein S7 |
| 20427 | 1536 | X53378 | N | ribosomal protein S13 | ribosomal protein S13 |
| 18606 | 1537 | X53504 | M | | |
| 25691 | 1537 | X53504 | N, G | | |
| 12903 | 1538 | X53517 | N | CD37 antigen | CD37 antigen |
| 20617 | 1539 | X53581 | F | | |
| 25692 | 1539 | X53581 | D | | |
| 1463 | 1540 | X54467 | M, G, K | cathepsin D | cathepsin D |
| 20725 | 1541 | X54510 | A | ATP synthase, H+ transporting, mitochondrial F0 | ATP synthase, H+ transporting, mitochondrial F0 complex, subunit F6 |
| | | | | complex, subunit F6 | |
| 20848 | 1542 | X54617 | M, G, K | | |
| 20161 | 1543 | X54686 | M, C, I | jun B proto-oncogene | jun B proto-oncogene |
| 21575 | 1544 | X55298 | J | ribophorin 2 | ribophorin 2 |
| 1447 | 1545 | X55986 | D | proteasome (prosome, macropain) subunit, alpha type 4 | proteasome (prosome, macropain) subunit, alpha type 4 |
| 21122 | 1546 | X56228 | N, E | thiosulfate sulfurtransferase | thiosulfate sulfurtransferase |
| 21123 | 1546 | X56228 | N, D | thiosulfate sulfurtransferase | thiosulfate sulfurtransferase |
| 1684 | 1547 | X56325 | J | hemoglobin, alpha 1 | hemoglobin, alpha 1 |
| 1885 | 1548 | X56546 | M, N | transcription factor 2 | transcription factor 2 |
| 10860 | 1549 | X57133 | N | hepatocyte nuclear factor 4, alpha | hepatocyte nuclear factor 4, alpha |
| 25699 | 1549 | X57133 | N | hepatocyte nuclear factor 4, alpha | hepatocyte nuclear factor 4, alpha |
| 10267 | 1550 | X57432 | N | ribosomal protein S2 | ribosomal protein S2 |
| 1037 | 1551 | X57523 | N | transporter 1, ATP-binding cassette, sub-family B | transporter 1, ATP-binding cassette, sub-family B (MDR/TAP) |
| | | | | (MDR/TAP) | |
| 19678 | 1552 | X57999 | M | deiodinase, iodothyronine, type I | deiodinase, iodothyronine, type I |
| 5667 | 1553 | X58200 | N | ribosomal protein L23 | |
| 18611 | 1553 | X58200 | N | ribosomal protein L23 | |
| 17175 | 1554 | X58389 | M, N | | |
| 10109 | 1555 | X58465 | N, G | ribosomal protein S5 | |
| 25702 | 1555 | X58465 | N, G | ribosomal protein S5 | |
| 25705 | 1556 | X59375 | M, J | | |
| 1141 | 1557 | X59601 | M, C, G | plectin | plectin |
| 25707 | 1558 | X59677 | N | solute carrier family 13, member 2 | solute carrier family 13, member 2 |
| 18354 | 1559 | X59859 | J | decorin | decorin |
| 21651 | 1560 | X60767 | N, E | cell division cycle 2 homolog A (S. pombe) | cell division cycle 2 homolog A (S. pombe) |
| 21239 | 1561 | X60769 | M, H, I | CCAAT/enhancer binding protein (C/EBP), beta | CCAAT/enhancer binding protein (C/EBP), beta |
| 21657 | 1562 | X61381 | M | | |
| 15875 | 1563 | X62145 | N | ribosomal protein L8 | |
| 25718 | 1563 | X62145 | M, G | ribosomal protein L8 | |
| 4441 | 1564 | X62146 | N, G | | |
| 25719 | 1564 | X62146 | N | | |
| 13646 | 1565 | X62166 | M, N, A, G | | |
| 18108 | 1566 | X62528 | N | ribonuclease/angiogenin inhibitor | ribonuclease/angiogenin inhibitor |
| 16012 | 1567 | X62875 | M, I | high mobility group AT-hook 1 | high mobility group AT-hook 1 |
| 15185 | 1568 | X62952 | M | vimentin | vimentin |
| 556 | 1569 | X64336 | M, N | Protein C | Protein C |
| 20844 | 1570 | X65228 | N | | |
| 16929 | 1571 | X66370 | G | ribosomal protein S9 | ribosomal protein S9 |
| 20085 | 1572 | X66870 | C | lamin A | lamin A |
| 495 | 1573 | X68041 | J | superoxide dismutase 3 | superoxide dismutase 3 |
| 417 | 1574 | X70141 | N | | |
| 405 | 1575 | X70223 | M, H, K | peroxisomal membrane protein 2 | peroxisomal membrane protein 2 |
| 24640 | 1576 | X70521 | N | Sodium channel, nonvoltage-gated 1, alpha (epithelial) | Sodium channel, nonvoltage-gated 1, alpha (epithelial) |
| 21443 | 1577 | X71127 | M, L | complement component 1, q subcomponent, beta | complement component 1, q subcomponent, beta polypeptide |
| | | | | polypeptide | |
| 22219 | 1578 | X72792 | N, F | alcohol dehydrogenase 1 | alcohol dehydrogenase 1 |
| 1877 | 1579 | X74593 | A, D, E | sorbitol dehydrogenase | sorbitol dehydrogenase |
| 15599 | 1580 | X75253 | J | phosphatidylethanolamine binding protein | phosphatidylethanolamine binding protein |
| 24626 | 1581 | X75856 | N | Testis enhanced gene transcript | Testis enhanced gene transcript |
| 16272 | 1582 | X76456 | N | afamin | afamin |
| 1993 | 1583 | X76985 | M, E, G, K | latexin | latexin |
| 24639 | 1584 | X77932 | N | Sodium channel, nonvoltage-gated 1, beta (epithelial) | Sodium channel, nonvoltage-gated 1, beta (epithelial) |
| 23854 | 1585 | X78327 | N, G | ribosomal protein L13 | ribosomal protein L13 |
| 635 | 1586 | X78848 | N | glutathione S-transferase, alpha 1 | glutathione S-transferase, alpha 1 |
| 13940 | 1587 | X79321 | N, D | microtubule-associated protein tau | microtubule-associated protein tau |
| 466 | 1588 | X81395 | N | carboxylesterase 1 | carboxylesterase 1 |
| 25747 | 1589 | X81448 | M, C, K | keratin complex 1, acidic, gene 18 | keratin complex 1, acidic, gene 18 |
| 570 | 1590 | X82445 | N | nuclear distribution gene C homolog (Aspergillus) | nuclear distribution gene C homolog (Aspergillus) |
| 1764 | 1591 | X83399 | C | eukaryotic translation initiation factor 4E | eukaryotic translation initiation factor 4E |
| 343 | 1592 | X91810 | L | signal transducer and activator of transcription 3 | signal transducer and activator of transcription 3 |
| 11849 | 1593 | X93352 | M, N, G | ribosomal protein L10a | ribosomal protein L10a |
| 18107 | 1594 | X94242 | N | ribosomal protein L14 | ribosomal protein L14 |
| 12978 | 1595 | X96437 | M, H, I | | |
| 25770 | 1595 | X96437 | N | | |
| 21585 | 1596 | X97772 | D | 3-phosphoglycerate dehydrogenase | 3-phosphoglycerate dehydrogenase |
| 21586 | 1596 | X97772 | D | 3-phosphoglycerate dehydrogenase | 3-phosphoglycerate dehydrogenase |
| 14347 | 1597 | Y00156 | N, H | UDP-glucuronosyltransferase 2B3 precursor, | UDP-glucuronosyltransferase 2B3 precursor, microsomal |
| | | | | microsomal | |
| 2629 | 1598 | Y00396 | K | v-myc avian myelocytomatosis viral oncogene homolog | v-myc avian myelocytomatosis viral oncogene homolog |
| 4594 | 1599 | Y07704 | N | Best5 protein | Best5 protein |
| 25777 | 1600 | Y08355 | M, A, F, I | sequestosome 1 | sequestosome 1 |
| 1858 | 1601 | Y09333 | B, L | (cytosolic acyl-CoA thioesterase 1, mitochondrial acyl- | (cytosolic acyl-CoA thioesterase 1, mitochondrial acyl-CoA thioesterase 1) |
| | | | | CoA thioesterase 1) | |
| 15986 | 1602 | Y09945 | M, I | putative integral membrane transport UST1r | putative integral membrane transport UST1r |
| 21914 | 1603 | Y13336 | J | | |
| 11840 | 1604 | Y15068 | H, I | stress-induced-phosphoprotein 1 (Hsp70/Hsp90- | stress-induced-phosphoprotein 1 (Hsp70/Hsp90-organizing protein) |
| | | | | organizing protein) | |
| 20173 | 1605 | Z11932 | N, C | arginine vasopressin receptor 2 | arginine vasopressin receptor 2 |
| 406 | 1606 | Z11995 | M | low density lipoprotein receptor-related protein | low density lipoprotein receptor-related protein associated protein 1 |
| | | | | associated protein 1 | |
| 407 | 1606 | Z11995 | N, C | low density lipoprotein receptor-related protein | low density lipoprotein receptor-related protein associated protein 1 |
| | | | | associated protein 1 | |
| 18352 | 1607 | Z12298 | L | | |
| 23780 | 1608 | Z19552 | E | topoisomerase (DNA) 2 alpha | topoisomerase (DNA) 2 alpha |
| 439 | 1609 | Z22607 | N, F | Bone morphogenetic protein 4 | Bone morphogenetic protein 4 |
| 494 | 1610 | Z24721 | J | superoxide dismutase 3 | superoxide dismutase 3 |
| 8663 | 1611 | Z27118 | N | heat shock 70 kD protein 1A | heat shock 70 kD protein 1A |
| 17226 | 1612 | Z36980 | N, C, E | D-dopachrome tautomerase | D-dopachrome tautomerase |
| 17227 | 1612 | Z36980 | N, E | D-dopachrome tautomerase | D-dopachrome tautomerase |
| 6641 | 1613 | Z49858 | M, A, I | plasmolipin | plasmolipin |
| 1542 | 1614 | Z50144 | N, J | kynurenine aminotransferase 2 | kynurenine aminotransferase 2 |
| 8664 | 1615 | Z75029 | N, C, D | | R. norvegicus hsp70.2 mRNA for heat shock protein 70 |
| 15569 | 1616 | Z78279 | N | collagen, type 1, alpha 1 | collagen, type 1, alpha 1 |
| 10887 | 1617 | Z83757 | M, I | growth hormone receptor | growth hormone receptor |

[0269] TABLE 2

| GLGC | | GenBank Acc or | Model | |
|---|---|---|---|---|
| Identifier | Seq ID | RefSeq ID | Code | Pathway Name |
| 25802 | 1353 | NM_031969 | G, K | [symbol] |
| | | | | activation of JNK Pathway via Pyk2 dependent signaling, BCR |
| | | | | Signaling Pathway, Bioactive Peptide Induced Signaling Pathway, |
| | | | | Ca++/Calmodulin-dependent Protein Kinase Activation, Control of |
| | | | | skeletal myogenesis by HDAC & calcium/calmodulin-dependent |
| | | | | kinase (CaMK), Corticosteroids and cardioprotection, Effects of |
| | | | | calcineurin in Keratinocyte Differentiation, Fc Epsilon Receptor I |
| | | | | Signaling in Mast Cells, Huntington's disease, Links between Pyk2 |
| | | | | and Map Kinases, NFAT and Hypertrophy of the heart (Transcription |
| | | | | in the broken heart), Neuropeptides VIP and PACAP inhibit the |
| | | | | apoptosis of activated T cells, Nitric Oxide Signaling Pathway, |
| | | | | Pertussis toxin-insensitive CCR5 Signaling in Macrophage, |
| | | | | Phosphatidylinositol signaling system, Regulation of PGC-1a, Role of |
| | | | | MEF2D in T-cell Apoptosis, Signaling Pathway from G-Protein |
| | | | | Families, T Cell Receptor Signaling Pathway, fMLP induced |
| | | | | chemokine gene expression in HMC-1 cells) |
| 20414 | 1188 | L14323 | M | (Activation of PKC through G protein coupled receptor, Aspirin |
| | | | | Blocks Signaling Pathway Involved in Platelet Activation, CCR3 |
| | | | | signaling in Eosinophils, Cadmium induces DNA synthesis and |
| | | | | proliferation in macrophages, G-Protein Signaling Through Tubby |
| | | | | Proteins, Inositol phosphate metabolism, PKC-catalyzed |
| | | | | phosphorylation of inhibitory phosphoprotein of myosin phosphatase, |
| | | | | Phosphatidylinositol signaling system, Phospholipase C Signaling |
| | | | | Pathway, Phospholipids as signalling intermediaries, Regulation of |
| | | | | ck1/cdk5 by type 1 glutamate receptors, Thrombin signaling and |
| | | | | protease-activated receptors, fMLP induced chemokine gene |
| | | | | expression in HMC-1 cells) |
| 556 | 1569 | X64336 | M, N | (Acute Myocardial Infarction, Extrinsic Prothrombin Activation |
| | | | | Pathway, Intrinsic Prothrombin Activation Pathway) |
| 46 | 1242 | M23697 | N | (Acute Myocardial Infarction, Fibrinolysis Pathway) |
| 14989 | 857 | AI177366 | M, K | (Adhesion Molecules on Lymphocyte, Agrin in Postsynaptic |
| | | | | Differentiation, Aspirin Blocks Signaling Pathway Involved in Platelet |
| | | | | Activation, B Cell Survival Pathway, Cells and Molecules involved in |
| | | | | local acute inflammatory response, Eph Kinases and ephrins support |
| | | | | platelet aggregation, Erk and PI-3 Kinase Are Necessary for |
| | | | | Collagen Binding in Corneal Epithelia, Erk1/Erk2 Mapk Signaling |
| | | | | pathway, Integrin Signaling Pathway, Monocyte and its Surface |
| | | | | Molecules, PTEN dependent cell cycle arrest and apoptosis, Ras- |
| | | | | Independent pathway in NK cell-mediated cytotoxicity, Signaling of |
| | | | | Hepatocyte Growth Factor Receptor, mCalpain and friends in Cell |
| | | | | motility, uCalpain and friends in Cell spread) |
| 2554 | 1063 | D00913 | M, N | (Adhesion Molecules on Lymphocyte, B Lymphocyte Cell Surtace |
| | | | | Molecules, CTL mediated immune response against target cells, |
| | | | | Cells and Molecules involved in local acute inflammatory response, |
| | | | | Monocyte and its Surface Molecules, Neutrophil and Its Surface |
| | | | | Molecules, T Cytotoxic Cell Surface Molecules, T Helper Cell Surface |
| | | | | Molecules) |
| 2555 | 1063 | D00913 | M, C, I | (Adhesion Molecules on Lymphocyte, B Lymphocyte Cell Surface |
| | | | | Molecules, CTL mediated immune response against target cells, |
| | | | | Cells and Molecules involved in local acute inflammatory response, |
| | | | | Monocyte and its Surface Molecules, Neutrophil and Its Surface |
| | | | | Molecules, T Cytotoxic Cell Surface Molecules, T Helper Cell Surface |
| | | | | Molecules) |
| 17907 | 969 | AI233224 | M | (Agrin in Postsynaptic Differentiation, Angiotensin II mediated |
| | | | | activation of JNK Pathway via Pyk2 dependent signaling, CBL |
| | | | | mediated ligand-induced downregulation of EGF receptors, EGF |
| | | | | Signaling Pathway, Erk1/Erk2 Mapk Signaling pathway, Keratinocyte |
| | | | | Differentiation, Map Kinase Inactivation of SMRT Corepressor, Role |
| | | | | of EGF Receptor Transactivation by GPCRs in Cardiac Hypertrophy, |
| | | | | Sprouty regulation of tyrosine kinase signals, The role of FYVE-finger |
| | | | | proteins in vesicle transport, mCalpain and friends in Cell motility) |
| 21651 | 1560 | X60767 | N, E | (AKAP95 role in mitosis and chromosome dynamics, Activation of |
| | | | | Src by Protein-tyrosine phosphatase alpha, Cell Cycle: G1/S Check |
| | | | | Point, Cell Cycle: G2/M Checkpoint, Cyclins and Cell Cycle |
| | | | | Regulation, How Progesterone Initiates the Oocyte Maturation, |
| | | | | Inositol phosphate metabolism, Nicotinate and nicotinamide |
| | | | | metabolism, Protein Kinase A at the Centrosome, RB Tumor |
| | | | | Suppressor/Checkpoint Signaling in response to DNA damage, Sonic |
| | | | | Hedgehog (SHH) Receptor Ptc1 Regulates cell cycle, |
| | | | | Sphingoglycolipid metabolism, Starch and sucrose metabolism, |
| | | | | cdc25 and chk1 Regulatory Pathway in response to DNA damage) |
| 3202 | 1527 | X16043 | N | (AKAP95 role in mitosis and chromosome dynamics, AKT Signaling |
| | | | | Pathway, ChREBP regulation by carbohydrates and cAMP, |
| | | | | Deregulation of CDK5 in Alzheimers Disease, Erk1/Erk2 Mapk |
| | | | | Signaling pathway, Inactivation of Gsk3 by AKT causes accumulation |
| | | | | of b-catenin in Alveolar Macrophages, Keratinocyte Differentiation, |
| | | | | Protein Kinase A at the Centrosome, Regulation of ck1/cdk5 by type |
| | | | | 1 glutamate receptors, Skeletal muscle hypertrophy is regulated via |
| | | | | AKT/mTOR pathway, WNT Signaling Pathway, mTOR Signaling |
| | | | | Pathway) |
| 16518 | 845 | AI176546 | N, C, K | (AKT Signaling Pathway, Actions of Nitric Oxide in the Heart, Ahr |
| | | | | Signal Transduction Pathway, Corticosteroids and cardioprotection, |
| | | | | Hypoxia and p53 in the Cardiovascular system, Hypoxia-Inducible |
| | | | | Factor in the Cardiovascular System, Mechanism of Gene Regulation |
| | | | | by Peroxisome Proliferators via PPARa(alpha)) |
| 20795 | 1360 | NM_175761 | N, H | (AKT Signaling Pathway, Actions of Nitric Oxide in the Heart, Ahr |
| | | | | Signal Transduction Pathway, Corticosteroids and cardioprotection, |
| | | | | Hypoxia and p53 in the Cardiovascular system, Hypoxia-Inducible |
| | | | | Factor in the Cardiovascular System, Mechanism of Gene Regulation |
| | | | | by Peroxisome Proliferators via PPARa(alpha)) |
| 16683 | 1086 | D17445 | N | (AKT Signaling Pathway, Cell Cycle: G2/M Checkpoint, Control of |
| | | | | skeletal myogenesis by HDAC & calcium/calmodulin-dependent |
| | | | | kinase (CaMK), Multiple antiapoptotic pathways from IGF-1R |
| | | | | signaling lead to BAD phosphorylation, RB Tumor |
| | | | | Suppressor/Checkpoint Signaling in response to DNA damage, |
| | | | | Regulation of BAD phosphorylation, Regulation of PGC-1a, |
| | | | | Regulation of cell cycle progression by Plk3, Role of nicotinic |
| | | | | acetylcholine receptors in the regulation of apoptosis, Signal |
| | | | | Dependent Regulation of Myogenesis by Corepressor MITR, cdc25 |
| | | | | and chk1 Regulatory Pathway in response to DNA damage) |
| 16684 | 1086 | D17445 | M | (AKT Signaling Pathway, Cell Cycle: G2/M Checkpoint, Control of |
| | | | | skeletal myogenesis by HDAC & calcium/calmodulin-dependent |
| | | | | kinase (CaMK), Multiple antiapoptotic pathways from IGF-1R |
| | | | | signaling lead to BAD phosphorylation, RB Tumor |
| | | | | Suppressor/Checkpoint Signaling in response to DNA damage, |
| | | | | Regulation of BAD phosphorylation, Regulation of PGC-1a, |
| | | | | Regulation of cell cycle progression by Plk3, Role of nicotinic |
| | | | | acetylcholine receptors in the regulation of apoptosis, Signal |
| | | | | Dependent Regulation of Myogenesis by Corepressor MITR, cdc25 |
| | | | | and chk1 Regulatory Pathway in response to DNA damage) |
| 17524 | 559 | AI010568 | M, A, I | (AKT Signaling Pathway, Growth Hormone Signaling Pathway, |
| | | | | Regulation of elF4e and p70 S6 Kinase, The IGF-1 Receptor and |
| | | | | Longevity) |
| 10887 | 1617 | Z83757 | M, I | (AKT Signaling Pathway, Growth Hormone Signaling Pathway, |
| | | | | Regulation of elF4e and p70 S6 Kinase, The IGF-1 Receptor and |
| | | | | Longevity) |
| 17630 | 201 | AA892012 | N | (Alanine and aspartate metabolism, Arginine and proline metabolism, |
| | | | | Cysteine metabolism, Glutamate metabolism, Phenylalanine |
| | | | | metabolism, Phenylalanine, tyrosine and tryptophan biosynthesis, |
| | | | | Tyrosine metabolism) |
| 4234 | 457 | AB016536 | N, K | (Alanine and aspartate metabolism, Arginine and proline metabolism, |
| | | | | Urea cycle and metabolism of amino groups) |
| 18727 | 1078 | D13978 | N | (Alanine and aspartate metabolism, Arginine and proline metabolism, |
| | | | | Urea cycle and metabolism of amino groups) |
| 20597 | 1512 | X12459 | N | (Alanine and aspartate metabolism, Arginine and proline metabolism, |
| | | | | Urea cycle and metabolism of amino groups) |
| 19824 | 1125 | E13557 | N, G, K | (Alanine and aspartate metabolism, Butanoate metabolism, |
| | | | | Glutamate metabolism, Taurine and hypotaurine metabolism, beta- |
| | | | | Alanine metabolism) |
| 19825 | 1288 | M64755 | N | (Alanine and aspartate metabolism, Butanoate metabolism, |
| | | | | Glutamate metabolism, Taurine and hypotaurine metabolism, beta- |
| | | | | Alanine metabolism) |
| 1478 | 1447 | U32314 | M | (Alanine and aspartate metabolism, Citrate cycle (TCA cycle), |
| | | | | Pyruvate metabolism, Shuttle for transfer of acetyl groups from |
| | | | | mitochondria to the cytosol) |
| 1479 | 1447 | U32314 | N, D | (Alanine and aspartate metabolism, Citrate cycle (TCA cycle), |
| | | | | Pyruvate metabolism, Shuttle for transfer of acetyl groups from |
| | | | | mitochondria to the cytosol) |
| 15703 | 444 | AB009372 | N | (Alanine and aspartate metabolism, Glycerolipid metabolism, |
| | | | | Phospholipid degradation) |
| 7914 | 439 | AB002584 | N | (Alanine and aspartate metabolism, Glycine, serine and threonine |
| | | | | metabolism) |
| 10789 | 947 | AI232059 | M | (Alanine and aspartate metabolism, Histidine metabolism) |
| 15072 | 1357 | NM_144730 | A | (ALK in cardiac myocytes, Hop Pathway in Cardiac Development, |
| | | | | NFAT and Hypertrophy of the heart (Transcription in the broken |
| | | | | heart)) |
| 13938 | 1339 | NM_017212 | N | (Alzheimer's disease, Bioactive Peptide Induced Signaling Pathway, |
| | | | | Deregulation of CDK5 in Alzheimers Disease, Parkinson's disease) |
| 13939 | 1339 | NM_017212 | D | (Alzheimer's disease, Bioactive Peptide Induced Signaling Pathway, |
| | | | | Deregulation of CDK5 in Alzheimers Disease, Parkinson's disease) |
| 13940 | 1587 | X79321 | N, D | (Alzheimer's disease, Bioactive Peptide Induced Signaling Pathway, |
| | | | | Deregulation of CDK5 in Alzheimers Disease, Parkinson's disease) |
| 15376 | 153 | AA875206 | N | (Alzheimer's disease, Gamma-aminobutyric Acid Receptor Life |
| | | | | Cycle) |
| 7488 | 464 | AF007758 | N | (Alzheimer's disease, Parkinson's disease) |
| 7489 | 464 | AF007758 | M, G, I, J, L | (Alzheimer's disease, Parkinson's disease) |
| 20555 | 1439 | U26033 | F | (Aminosugars metabolism, Butanoate metabolism, Glycerolipid |
| | | | | metabolism, Histidine metabolism, Lysine biosynthesis, Lysine |
| | | | | degradation, Phenylalanine metabolism, Tyrosine metabolism, |
| | | | | Valine, leucine and isoleucine degradation) |
| 912 | 1468 | U59184 | N | (Amyotrophic lateral sclerosis (ALS), Apoptotic Signaling in |
| | | | | Response to DNA Damage, Ceramide Signaling Pathway, Hypoxia |
| | | | | and p53 in the Cardiovascular system, Regulation of BAD |
| | | | | phosphorylation, Role of Mitochondria in Apoptotic Signaling, p53 |
| | | | | Signaling Pathway) |
| 20876 | 1238 | M21060 | J | (Amyotrophic lateral sclerosis (ALS), Cardiac Protection Against |
| | | | | ROS, Free Radical Induced Apoptosis, The IGF-1 Receptor and |
| | | | | Longevity) |
| 1853 | 1511 | X12367 | N | (Amyotrophic lateral sclerosis (ALS), Glutathione metabolism) |
| 15741 | 1214 | M11670 | N | (Amyotrophic lateral sclerosis (ALS), Methane metabolism, The IGF- |
| | | | | 1 Receptor and Longevity, Tryptophan metabolism) |
| 275 | 1434 | U22424 | M | (Androgen and estrogen metabolism, C21-Steroid hormone |
| | | | | metabolism) |
| 23660 | 747 | AI105448 | N | (Androgen and estrogen metabolism, C21-Steroid hormone |
| | | | | metabolism, Visceral Fat Deposits and the Metabolic Syndrome) |
| 20772 | 1470 | U60882 | N | (Androgen and estrogen metabolism, Histidine metabolism, |
| | | | | Selenoamino acid metabolism, Tryptophan metabolism, Tyrosine |
| | | | | metabolism, Ubiquinone biosynthesis) |
| 25070 | 1397 | S83279 | M, N | (Androgen and estrogen metabolism, Mechanism of Gene |
| | | | | Regulation by Peroxisome Proliferators via PPARa(alpha)) |
| 5492 | 1097 | D38061 | N | (Androgen and estrogen metabolism, Pentose and glucuronate |
| | | | | interconversions, Porphyrin and chlorophyll metabolism, Starch and |
| | | | | sucrose metabolism) |
| 18028 | 1098 | D38062 | N | (Androgen and estrogen metabolism, Pentose and glucuronate |
| | | | | interconversions, Porphyrin and chlorophyll metabolism, Starch and |
| | | | | sucrose metabolism) |
| 1354 | 1099 | D38065 | N | (Androgen and estrogen metabolism, Pentose and glucuronate |
| | | | | interconversions, Porphyrin and chlorophyll metabolism, Starch and |
| | | | | sucrose metabolism) |
| 15126 | 1113 | D83796 | N | (Androgen and estrogen metabolism, Pentose and glucuronate |
| | | | | interconversions, Porphyrin and chlorophyll metabolism, Starch and |
| | | | | sucrose metabolism) |
| 15124 | 1134 | J02612 | N, B | (Androgen and estrogen metabolism, Pentose and glucuronate |
| | | | | interconversions, Porphyrin and chlorophyll metabolism, Starch and |
| | | | | sucrose metabolism) |
| 15125 | 1162 | J05132 | N, B | (Androgen and estrogen metabolism, Pentose and glucuronate |
| | | | | interconversions, Porphyrin and chlorophyll metabolism, Starch and |
| | | | | sucrose metabolism) |
| 14346 | 1252 | M31109 | N, B, H | (Androgen and estrogen metabolism, Pentose and glucuronate |
| | | | | interconversions, Porphyrin and chlorophyll metabolism, Starch and |
| | | | | sucrose metabolism) |
| 11755 | 1259 | M33746 | N, B, H | (Androgen and estrogen metabolism, Pentose and glucuronate |
| | | | | interconversions, Porphyrin and chlorophyll metabolism, Starch and |
| | | | | sucrose metabolism) |
| 5493 | 1369 | S56936 | N | (Androgen and estrogen metabolism, Pentose and glucuronate |
| | | | | interconversions, Porphyrin and chlorophyll metabolism, Starch and |
| | | | | sucrose metabolism) |
| 15127 | 1370 | S56937 | N | (Androgen and estrogen metabolism, Pentose and glucuronate |
| | | | | interconversions, Porphyrin and chlorophyll metabolism, Starch and |
| | | | | sucrose metabolism) |
| 17806 | 1407 | U06273 | N | (Androgen and estrogen metabolism, Pentose and glucuronate |
| | | | | interconversions, Porphyrin and chlorophyll metabolism, Starch and |
| | | | | sucrose metabolism) |
| 17805 | 1408 | U06274 | N, B | (Androgen and estrogen metabolism, Pentose and glucuronate |
| | | | | interconversions, Porphyrin and chlorophyll metabolism, Starch and |
| | | | | sucrose metabolism) |
| 1537 | 1441 | U27518 | N, H | (Androgen and estrogen metabolism, Pentose and glucuronate |
| | | | | interconversions, Porphyrin and chlorophyll metabolism, Starch and |
| | | | | sucrose metabolism) |
| 14633 | 1499 | X03478 | H | (Androgen and estrogen metabolism, Pentose and glucuronate |
| | | | | interconversions, Porphyrin and chlorophyll metabolism, Starch and |
| | | | | sucrose metabolism) |
| 14347 | 1597 | Y00156 | N, H | (Androgen and estrogen metabolism, Pentose and glucuronate |
| | | | | interconversions, Porphyrin and chlorophyll metabolism, Starch and |
| | | | | sucrose metabolism) |
| 1453 | 1456 | U48596 | F, K | [symbol] |
| | | | | dependent signaling, BCR Signaling Pathway, CD40L Signaling |
| | | | | Pathway, Ceramide Signaling Pathway, EGF Signaling Pathway, |
| | | | | FAS signaling pathway (CD95), Fc Epsilon Receptor I Signaling in |
| | | | | Mast Cells, HIV-I Nef: negative effector of Fas and TNF, Human |
| | | | | Cytomegalovirus and Map Kinase Pathways, Inhibition of Cellular |
| | | | | Proliferation by Gleevec, Inositol phosphate metabolism, |
| | | | | Keratinocyte Differentiation, Links between Pyk2 and Map Kinases, |
| | | | | MAPKinase Signaling Pathway, Map Kinase Inactivation of SMRT |
| | | | | Corepressor, NF-kB Signaling Pathway, Neuropeptides VIP and |
| | | | | PACAP inhibit the apoptosis of activated T cells, Nicotinate and |
| | | | | nicotinamide metabolism, PDGF Signaling Pathway, Rac 1 cell |
| | | | | motility signaling pathway, Role of MAL in Rho-Mediated Activation |
| | | | | of SRF, Signal transduction through IL1R, Sphingoglycolipid |
| | | | | metabolism, Starch and sucrose metabolism, T Cell Receptor |
| | | | | Signaling Pathway, TNF/Stress Related Signaling, TNFR1 Signaling |
| | | | | Pathway, TNFR2 Signaling Pathway, The 4-1BB-dependent immune |
| 1454 | 1456 | U48596 | M, K | [symbol] |
| | | | | dependent signaling, BCR Signaling Pathway, CD40L Signaling |
| | | | | Pathway, Ceramide Signaling Pathway, EGF Signaling Pathway, |
| | | | | FAS signaling pathway (CD95), Fc Epsilon Receptor I Signaling in |
| | | | | Mast Cells, HIV-I Nef: negative effector of Fas and TNF, Human |
| | | | | Cytomegalovirus and Map Kinase Pathways, Inhibition of Cellular |
| | | | | Proliferation by Gleevec, Inositol phosphate metabolism, |
| | | | | Keratinocyte Differentiation, Links between Pyk2 and Map Kinases, |
| | | | | MAPKinase Signaling Pathway, Map Kinase Inactivation of SMRT |
| | | | | Corepressor, NF-kB Signaling Pathway, Neuropeptides VIP and |
| | | | | PACAP inhibit the apoptosis of activated T cells, Nicotinate and |
| | | | | nicotinamide metabolism, PDGF Signaling Pathway, Rac 1 cell |
| | | | | motility signaling pathway, Role of MAL in Rho-Mediated Activation |
| | | | | of SRF, Signal transduction through IL1R, Sphingoglycolipid |
| | | | | metabolism, Starch and sucrose metabolism, T Cell Receptor |
| | | | | Signaling Pathway, TNF/Stress Related Signaling, TNFR1 Signaling |
| | | | | Pathway, TNFR2 Signaling Pathway, The 4-1BB-dependent immune |
| 15434 | 531 | AI008836 | N | (Apoptotic DNA fragmentation and tissue homeostasis, Granzyme A |
| | | | | mediated Apoptosis Pathway) |
| 15437 | 1114 | D84418 | E | (Apoptotic DNA fragmentation and tissue homeostasis, Granzyme A |
| | | | | mediated Apoptosis Pathway) |
| 16116 | 475 | AF025670 | F | (Apoptotic Signaling in Response to DNA Damage, Caspase |
| | | | | Cascade in Apoptosis, FAS signaling pathway (CD95), HIV-I Nef: |
| | | | | negative effector of Fas and TNF, Huntington's disease, Induction of |
| | | | | apoptosis through DR3 and DR4/5 Death Receptors, Role of |
| | | | | Mitochondria in Apoptotic Signaling) |
| 4592 | 1135 | J02646 | H | (Apoptotic Signaling in Response to DNA Damage, Double Stranded |
| | | | | RNA Induced Gene Expression, Eukaryotic protein translation, |
| | | | | Regulation of elF2, Skeletal muscle hypertrophy is regulated via |
| | | | | AKT/mTOR pathway) |
| 23884 | 1293 | M73714 | J | (Arginine and proline metabolism, Bile acid biosynthesis, Butanoate |
| | | | | metabolism, Fatty acid metabolism, Glycerolipid metabolism, |
| | | | | Glycolysis/Gluconeogenesis, Histidine metabolism, Lysine |
| | | | | degradation, Phenylalanine metabolism, Propanoate metabolism, |
| | | | | Pyruvate metabolism, Tryptophan metabolism, Tyrosine metabolism, |
| | | | | Valine, leucine and isoleucine degradation, beta-Alanine metabolism) |
| 16884 | 723 | AI103758 | E | (Arginine and proline metabolism, Bile acid biosynthesis, Butanoate |
| | | | | metabolism, Fatty acid metabolism, Glycerolipid metabolism, |
| | | | | Glycolysis/Gluconeogenesis, Histidine metabolism, Lysine |
| | | | | degradation, Propanoate metabolism, Pyruvate metabolism, |
| | | | | Tryptophan metabolism, Valine, leucine and isoleucine degradation, |
| | | | | beta-Alanine metabolism) |
| 16885 | 739 | AI105188 | K | (Arginine and proline metabolism, Bile acid biosynthesis, Butanoate |
| | | | | metabolism, Fatty acid metabolism, Glycerolipid metabolism, |
| | | | | Glycolysis/Gluconeogenesis, Histidine metabolism, Lysine |
| | | | | degradation, Propanoate metabolism, Pyruvate metabolism, |
| | | | | Tryptophan metabolism, Valine, leucine and isoleucine degradation, |
| | | | | beta-Alanine metabolism) |
| 4574 | 968 | AI233216 | N | (Arginine and proline metabolism, Glutamate metabolism, Urea cycle |
| | | | | and metabolism of amino groups) |
| 16948 | 1151 | J03588 | N, A, C | (Arginine and proline metabolism, Glycine, serine and threonine |
| | | | | metabolism, Urea cycle and metabolism of amino groups) |
| 16775 | 1411 | U07971 | M, D, I, L | (Arginine and proline metabolism, Glycine, serine and threonine |
| | | | | metabolism, Urea cycle and metabolism of amino groups) |
| 16947 | 1510 | X08056 | N | (Arginine and proline metabolism, Glycine, serine and threonine |
| | | | | metabolism, Urea cycle and metabolism of amino groups) |
| 4242 | 276 | AA893325 | N | (Arginine and proline metabolism, Urea cycle and metabolism of |
| | | | | amino groups) |
| 4467 | 1274 | M57664 | N | (Arginine and proline metabolism, Urea cycle and metabolism of |
| | | | | amino groups) |
| 25467 | 1321 | M93297 | N, G | (Arginine and proline metabolism, Urea cycle and metabolism of |
| | | | | amino groups) |
| 1419 | 1492 | U90887 | N | (Arginine and proline metabolism, Urea cycle and metabolism of |
| | | | | amino groups) |
| 23523 | 1509 | X07944 | N | (Arginine and proline metabolism, Urea cycle and metabolism of |
| | | | | amino groups) |
| 17377 | 1514 | X13058 | N | (ATM Signaling Pathway, Amyotrophic lateral scierosis (ALS), |
| | | | | Apoptotic Signaling in Response to DNA Damage, Cell Cycle: G1/S |
| | | | | Check Point, Cell Cycle: G2/M Checkpoint, Chaperones modulate |
| | | | | interferon Signaling Pathway, Double Stranded RNA Induced Gene |
| | | | | Expression, Huntington's disease, Hypoxia and p53 in the |
| | | | | Cardiovascular system, Overview of telomerase protein component |
| | | | | gene hTert Transcriptional Regulation, RB Tumor |
| | | | | Suppressor/Checkpoint Signaling in response to DNA damage, |
| | | | | Regulation of cell cycle progression by Plk3, Regulation of |
| | | | | transcriptional activity by PML, Tumor Suppressor Arf Inhibits |
| | | | | Ribosomal Biogenesis, p53 Signaling Pathway) |
| 133 | 1436 | U24174 | N | (ATM Signaling Pathway, Cell Cycle: G1/S Check Point, Cell Cycle: |
| | | | | G2/M Checkpoint, Cyclins and Cell Cycle Regulation, Effects of |
| | | | | calcineurin in Keratinocyte Differentiation, Erythropoietin mediated |
| | | | | neuroprotection through NF-kB, Hypoxia and p53 in the |
| | | | | Cardiovascular system, Influence of Ras and Rho proteins on G1 to |
| | | | | S Transition, p53 Signaling Pathway) |
| 352 | 661 | AI070295 | H | (ATM Signaling Pathway, Cell Cycle: G2/M Checkpoint, Hypoxia and |
| | | | | p53 in the Cardiovascular system, p53 Signaling Pathway) |
| 353 | 1203 | L32591 | M, H, I | (ATM Signaling Pathway, Cell Cycle: G2/M Checkpoint, Hypoxia and |
| | | | | p53 in the Cardiovascular system, p53 Signaling Pathway) |
| 354 | 1203 | L32591 | M, H, I | (ATM Signaling Pathway, Cell Cycle: G2/M Checkpoint, Hypoxia and |
| | | | | p53 in the Cardiovascular system, p53 Signaling Pathway) |
| 20841 | 1279 | M58758 | H | (ATP synthesis, Oxidative phosphorylation) |
| 18449 | 1399 | U00926 | H | (ATP synthesis, Oxidative phosphorylation) |
| 20725 | 1541 | X54510 | A | (ATP synthesis, Oxidative phosphorylation, Purine metabolism) |
| 23698 | 1139 | J02749 | N, D | (Bile acid biosynthesis, Fatty acid biosynthesis (path 2), Fatty acid |
| | | | | metabolism, Valine, leucine and isoleucine degradation) |
| 23699 | 1139 | J02749 | N, D, E | (Bile acid biosynthesis, Fatty acid biosynthesis (path 2), Fatty acid |
| | | | | metabolism, Valine, leucine and isoleucine degradation) |
| 22219 | 1578 | X72792 | N, F | (Bile acid biosynthesis, Fatty acid metabolism, Glycerolipid |
| | | | | metabolism, Glycolysis/Gluconeogenesis, Tyrosine metabolism) |
| 10260 | 1393 | S81497 | N | (Bile acid biosynthesis, Glycerolipid metabolism) |
| 25563 | 1393 | S81497 | N | (Bile acid biosynthesis, Glycerolipid metabolism) |
| 10241 | 489 | AF048687 | N, C, K | (Blood group glycolipid biosynthesis-lact series, Blood group |
| | | | | glycolipid biosynthesis-neolact series, Fructose and mannose |
| | | | | metabolism, Globoside metabolism, Glycerolipid metabolism, |
| | | | | Keratan sulfate biosynthesis, N-Glycans biosynthesis, O-Glycans |
| | | | | biosynthesis, Sphingoglycolipid metabolism) |
| 4198 | 1305 | M83143 | M, N, I | (Blood group glycolipid biosynthesis-neolact series, Keratan sulfate |
| | | | | biosynthesis, N-Glycans biosynthesis) |
| 4199 | 1305 | M83143 | M, N | (Blood group glycolipid biosynthesis-neolact series, Keratan sulfate |
| | | | | biosynthesis, N-Glycans biosynthesis) |
| 18956 | 1059 | D00512 | N | (Butanoate metabolism, Fatty acid biosynthesis (path 2), Fatty acid |
| | | | | metabolism, Low-density lipoprotein (LDL) pathway during |
| | | | | atherogenesis, Lysine degradation, Propanoate metabolism, |
| | | | | Pyruvate metabolism, Synthesis and degradation of ketone bodies, |
| | | | | Tryptophan metabolism) |
| 18958 | 1077 | D13921 | N | (Butanoate metabolism, Fatty acid biosynthesis (path 2), Fatty acid |
| | | | | metabolism, Low-density lipoprotein (LDL) pathway during |
| | | | | atherogenesis, Lysine degradation, Propanoate metabolism, |
| | | | | Pyruvate metabolism, Synthesis and degradation of ketone bodies, |
| | | | | Tryptophan metabolism) |
| 17758 | 1173 | K03249 | N | (Butanoate metabolism, Fatty acid biosynthesis (path 2), Fatty acid |
| | | | | metabolism, Lysine degradation, Mechanism of Gene Regulation by |
| | | | | Peroxisome Proliferators via PPARa(alpha), Propanoate metabolism, |
| | | | | Tryptophan metabolism, Valine, leucine and isoleucine degradation, |
| | | | | beta-Alanine metabolism) |
| 16768 | 1083 | D16478 | N | (Butanoate metabolism, Fatty acid biosynthesis (path 2), Fatty acid |
| | | | | metabolism, Lysine degradation, Propanoate metabolism, |
| | | | | Tryptophan metabolism, Valine, leucine and isoleucine degradation, |
| | | | | beta-Alanine metabolism) |
| 21562 | 1525 | X15958 | N, A | (Butanoate metabolism, Fatty acid biosynthesis (path 2), Fatty acid |
| | | | | metabolism, Lysine degradation, Propanoate metabolism, |
| | | | | Tryptophan metabolism, Valine, leucine and isoleucine degradation, |
| | | | | beta-Alanine metabolism) |
| 15175 | 355 | AA945583 | E | (Butanoate metabolism, Fatty acid biosynthesis (path 2), Fatty acid |
| | | | | metabolism, Lysine degradation, Tryptophan metabolism, Valine, |
| | | | | leucine and isoleucine degradation) |
| 19252 | 204 | AA892041 | H | (Butanoate metabolism, Methane metabolism, Pentose and |
| | | | | glucuronate interconversions, Phenylalanine metabolism) |
| 19254 | 467 | AF014009 | H | (Butanoate metabolism, Methane metabolism, Pentose and |
| | | | | glucuronate interconversions, Phenylalanine metabolism) |
| 783 | 1011 | AI236589 | F | (Butanoate metabolism, Pentose and glucuronate interconversions) |
| 2812 | 809 | AI171090 | J | (Butanoate metabolism, Synthesis and degradation of ketone bodies, |
| | | | | Valine, leucine and isoleucine degradation) |
| 15580 | 1258 | M33648 | N | (Butanoate metabolism, Synthesis and degradation of ketone bodies, |
| | | | | Valine, leucine and isoleucine degradation) |
| 2629 | 1598 | Y00396 | K | (Cadmium induces DNA synthesis and proliferation in macrophages, |
| | | | | Erk1/Erk2 Mapk Signaling pathway, IL-2 Receptor Beta Chain in T |
| | | | | cell Activation, Inhibition of Cellular Proliferation by Gleevec, |
| | | | | MAPKinase Signaling Pathway, Mechanism of Gene Regulation by |
| | | | | Peroxisome Proliferators via PPARa(alpha), Neuropeptides VIP and |
| | | | | PACAP inhibit the apoptosis of activated T cells, Overview of |
| | | | | telomerase protein component gene hTert Transcriptional |
| | | | | Regulation, Role of EGF Receptor Transactivation by GPCRs in |
| | | | | Cardiac Hypertrophy, Tumor Suppressor Arf Inhibits Ribosomal |
| | | | | Biogenesis, WNT Signaling Pathway, p38 MAPK Signaling Pathway) |
| 11434 | 1079 | D14014 | N, B | (CARM1 and Regulation of the Estrogen Receptor, Cell Cycle: G1/S |
| | | | | Check Point, Cyclins and Cell Cycle Regulation, Inactivation of Gsk3 |
| | | | | by AKT causes accumulation of b-catenin in Alveolar Macrophages, |
| | | | | Influence of Ras and Rho proteins on G1 to S Transition, WNT |
| | | | | Signaling Pathway, p53 Signaling Pathway) |
| 24232 | 1359 | NM_171992 | B | (CARM1 and Regulation of the Estrogen Receptor, Cell Cycle: G1/S |
| | | | | Check Point, Cyclins and Cell Cycle Regulation, Inactivation of Gsk3 |
| | | | | by AKT causes accumulation of b-catenin in Alveolar Macrophages, |
| | | | | Influence of Ras and Rho proteins on G1 to S Transition, WNT |
| | | | | Signaling Pathway, p53 Signaling Pathway) |
| 20086 | 590 | AI013260 | M, H | (Caspase Cascade in Apoptosis, FAS signaling pathway (CD95), |
| | | | | HIV-I Nef: negative effector of Fas and TNF, Induction of apoptosis |
| | | | | through DR3 and DR4/5 Death Receptors, TNFR1 Signaling |
| | | | | Pathway) |
| 20085 | 1572 | X66870 | C | (Caspase Cascade in Apoptosis, FAS signaling pathway (CD95), |
| | | | | HIV-I Nef: negative effector of Fas and TNF, Induction of apoptosis |
| | | | | through DR3 and DR4/5 Death Receptors, TNFR1 Signaling |
| | | | | Pathway) |
| 3584 | 716 | AI103106 | E | (Caspase Cascade in Apoptosis, FAS signaling pathway (CD95), |
| | | | | HIV-I Nef: negative effector of Fas and TNF, TNFR1 Signaling |
| | | | | Pathway) |
| 20885 | 1403 | U04842 | N, G, K | (CBL mediated ligand-induced downregulation of EGF receptors, |
| | | | | EGF Signaling Pathway, Keratinocyte Differentiation, Map Kinase |
| | | | | Inactivation of SMRT Corepressor, Role of EGF Receptor |
| | | | | Transactivation by GPCRs in Cardiac Hypertrophy, Sprouty |
| | | | | regulation of tyrosine kinase signals, The role of FYVE-finger |
| | | | | proteins in vesicle transport, mCalpain and friends in Cell motility) |
| 20884 | 1513 | X12748 | N, G, K | (CBL mediated ligand-induced downregulation of EGF receptors, |
| | | | | EGF Signaling Pathway, Keratinocyte Differentiation, Map Kinase |
| | | | | Inactivation of SMRT Corepressor, Role of EGF Receptor |
| | | | | Transactivation by GPCRs in Cardiac Hypertrophy, Sprouty |
| | | | | regulation of tyrosine kinase signals, The role of FYVE-finger |
| | | | | proteins in vesicle transport, mCalpain and friends in Cell motility) |
| 15364 | 742 | AI105348 | J | (CCR3 signaling in Eosinophils, Rac 1 cell motility signaling pathway, |
| | | | | Rho cell motility signaling pathway) |
| 21165 | 78 | AA848941 | K | (Cell to Cell Adhesion Signaling, Integrin Signaling Pathway, |
| | | | | uCalpain and friends in Cell spread) |
| 21166 | 78 | AA848941 | K | (Cell to Cell Adhesion Signaling, Integrin Signaling Pathway, |
| | | | | uCalpain and friends in Cell spread) |
| 17514 | 324 | AA925554 | E, G | (Citrate cycle (TCA cycle), Electron Transport Reaction in |
| | | | | Mitochondria, Oxidative phosphorylation, Propanoate metabolism) |
| 4723 | 515 | AF093773 | N | (Citrate cycle (TCA cycle), Malate-aspartate shuttle, Pyruvate |
| | | | | metabolism, Shuttle for transfer of acetyl groups from mitochondria to |
| | | | | the cytosol) |
| 165 | 778 | AI145329 | F | (Citrate cycle (TCA cycle), Pyruvate metabolism) |
| 15851 | 1453 | U42719 | M | (Classical Complement Pathway, Complement Pathway, Lectin |
| | | | | Induced Complement Pathway) |
| 21053 | 1226 | M15481 | M | (Control of skeletal myogenesis by HDAC & calcium/calmodulin- |
| | | | | dependent kinase (CaMK), Erythrocyte Differentiation Pathway, IGF- |
| | | | | 1 Signaling Pathway, NFAT and Hypertrophy of the heart |
| | | | | (Transcription in the broken heart), Regulation of BAD |
| | | | | phosphorylation, Skeletal muscle hypertrophy is regulated via |
| | | | | AKT/mTOR pathway, The IGF-1 Receptor and Longevity) |
| 4330 | 60 | AA818747 | M, B | (CXCR4 Signaling Pathway, Pertussis toxin-insensitive CCR5 |
| | | | | Signaling in Macrophage) |
| 24321 | 956 | AI232340 | M, K, L | (CXCR4 Signaling Pathway, Pertussis toxin-insensitive CCR5 |
| | | | | Signaling in Macrophage) |
| 24778 | 1515 | X13119 | N | (Cysteine metabolism, Glycine, serine and threonine metabolism) |
| 17807 | 1270 | M54926 | M, G | (Cysteine metabolism, Glycolysis/Gluconeogenesis, Hypoxia- |
| | | | | Inducible Factor in the Cardiovascular System, Propanoate |
| | | | | metabolism, Pyruvate metabolism) |
| 7124 | 1409 | U07181 | E | (Cysteine metabolism, Glycolysis/Gluconeogenesis, Propanoate |
| | | | | metabolism, Pyruvate metabolism, SARS Coronavirus Protease) |
| 18452 | 1085 | D17370 | M, N | (Cysteine metabolism, Methionine metabolism, Selenoamino acid |
| | | | | metabolism) |
| 18453 | 1085 | D17370 | N, G | (Cysteine metabolism, Methionine metabolism, Selenoamino acid |
| | | | | metabolism) |
| 15028 | 336 | AA942685 | N, F | (Cysteine metabolism, Taurine and hypotaurine metabolism) |
| 25024 | 1124 | E03229 | N | (Cysteine metabolism, Taurine and hypotaurine metabolism) |
| 1540 | 1246 | M25073 | N | (Dendritic cells in regulating TH1 and TH2 Development, Glutathione |
| | | | | metabolism, SARS Coronavirus Protease, Urea cycle and |
| | | | | metabolism of amino groups) |
| 7064 | 1220 | M12919 | N | (Downregulated of MTA-3 in ER-negative Breast Tumors, Fructose |
| | | | | and mannose metabolism, Glycolysis/Gluconeogenesis, Pentose |
| | | | | phosphate pathway) |
| 343 | 1592 | X91810 | L | (EGF Signaling Pathway, Erk1/Erk2 Mapk Signaling pathway, IL 6 |
| | | | | signaling pathway, IL22 Soluble Receptor Signaling Pathway, PDGF |
| | | | | Signaling Pathway, Signaling of Hepatocyte Growth Factor Receptor, |
| | | | | Stat3 Signaling Pathway, TPO Signaling Pathway) |
| 2109 | 47 | AA817887 | N, G | (Erk and PI-3 Kinase Are Necessary for Collagen Binding in Corneal |
| | | | | Epithelia, Rho cell motility signaling pathway) |
| 18713 | 585 | AI012604 | N, L | (Eukaryotic protein translation, Regulation of elF2) |
| 18716 | 1345 | NM_020075 | F | (Eukaryotic protein translation, Regulation of elF2) |
| 20741 | 510 | AF084186 | A, J | (FAS signaling pathway (CD95), HIV-I Nef: negative effector of Fas |
| | | | | and TNF, Induction of apoptosis through DR3 and DR4/5 Death |
| | | | | Receptors, TNFR1 Signaling Pathway, uCalpain and friends in Cell |
| | | | | spread) |
| 20849 | 1502 | X05566 | M, G, K | (FAS signaling pathway (CD95), HIV-I Nef: negative effector of Fas |
| | | | | and TNF, Keratinocyte Differentiation, MAPKinase Signaling |
| | | | | Pathway, Purine metabolism, Regulation of transcriptional activity by |
| | | | | PML, Stress Induction of HSP Regulation, p38 MAPK Signaling |
| | | | | Pathway) |
| 1977 | 1164 | J05470 | N, L | (Fatty acid metabolism, Glycerolipid metabolism, Mitochondrial |
| | | | | Carnitine Palmitoyltransferase (CPT) System) |
| 15411 | 1178 | L07736 | N, B, L | (Fatty acid metabolism, Glycerolipid metabolism, Mitochondrial |
| | | | | Carnitine Palmitoyltransferase (CPT) System, Reversal of Insulin |
| | | | | Resistance by Leptin) |
| 13004 | 1007 | AI236284 | J, L | (Fatty acid metabolism, Glycolysis/Gluconeogenesis, Propanoate |
| | | | | metabolism, Pyruvate metabolism) |
| 13005 | 1116 | D85189 | N, C | (Fatty acid metabolism, Glycolysis/Gluconeogenesis, Propanoate |
| | | | | metabolism, Pyruvate metabolism) |
| 4011 | 496 | AF056333 | N, J | (Fatty acid metabolism, Mechanism of Acetaminophen Activity and |
| | | | | Toxicity, Tryptophan metabolism) |
| 4012 | 1367 | S48325 | N, J | (Fatty acid metabolism, Mechanism of Acetaminophen Activity and |
| | | | | Toxicity, Tryptophan metabolism) |
| 16150 | 11 | AA799489 | G | (Fatty acid metabolism, Mechanism of Gene Regulation by |
| | | | | Peroxisome Proliferators via PPARa(alpha)) |
| 16148 | 1140 | J02752 | N | (Fatty acid metabolism, Mechanism of Gene Regulation by |
| | | | | Peroxisome Proliferators via PPARa(alpha)) |
| 21078 | 1143 | J02791 | N, G | (Fatty acid metabolism, Propanoate metabolism, Valine, leucine and |
| | | | | isoleucine degradation, beta-Alanine metabolism) |
| 20716 | 1323 | M94548 | G | (Fatty acid metabolism, Prostaglandin and leukotriene metabolism, |
| | | | | Tryptophan metabolism) |
| 1174 | 1136 | J02657 | N | (Fatty acid metabolism, Tryptophan metabolism) |
| 67 | 1268 | M37828 | B | (Fatty acid metabolism, Tryptophan metabolism) |
| 14997 | 1150 | J03572 | N | (Folate biosynthesis, Glycerolipid metabolism) |
| 14996 | 1526 | X16038 | M, D | (Folate biosynthesis, Glycerolipid metabolism) |
| 1431 | 632 | AI044610 | D | (Folate biosynthesis, Histidine metabolism, Phenylalanine |
| | | | | metabolism, Tryptophan metabolism, Tyrosine metabolism) |
| 1430 | 1309 | M84648 | M | (Folate biosynthesis, Histidine metabolism, Phenylalanine |
| | | | | metabolism, Tryptophan metabolism, Tyrosine metabolism) |
| 1549 | 1166 | J05519 | G | (Folate biosynthesis, One carbon pool by folate) |
| 6405 | 1208 | L38615 | G | (Free Radical Induced Apoptosis, Glutamate metabolism, |
| | | | | Glutathione metabolism) |
| 6406 | 1208 | L38615 | N | (Free Radical Induced Apoptosis, Glutamate metabolism, |
| | | | | Glutathione metabolism) |
| 21975 | 827 | AI172247 | N, B, L | (Free Radical Induced Apoptosis, Purine metabolism) |
| 1340 | 1437 | U25651 | B | (Fructose and mannose metabolism, Galactose metabolism, |
| | | | | Glycolysis/Gluconeogenesis, Pentose phosphate pathway) |
| 820 | 225 | AA892395 | N | (Fructose and mannose metabolism, Glycolysis/Gluconeogenesis, |
| | | | | Glycolysis Pathway, Pentose phosphate pathway) |
| 818 | 1497 | X02291 | N | (Fructose and mannose metabolism, Glycolysis/Gluconeogenesis, |
| | | | | Glycolysis Pathway, Pentose phosphate pathway) |
| 16895 | 1313 | M86240 | N | (Fructose and mannose metabolism, Glycolysis/Gluconeogenesis, |
| | | | | Pentose phosphate pathway) |
| 968 | 1119 | D86745 | G, K | (FXR and LXR Regulation of Cholesterol Metabolism, Mechanism of |
| | | | | Gene Regulation by Peroxisome Proliferators via PPARa(alpha)) |
| 1321 | 1206 | L37333 | N | (Galactose metabolism, Glycolysis/Gluconeogenesis, Starch and |
| | | | | sucrose metabolism) |
| 1622 | 1300 | M80804 | N | (Galactose metabolism, Starch and sucrose metabolism) |
| 1247 | 1163 | J05181 | N, J | (Glutamate metabolism, Glutathione metabolism) |
| 14003 | 1374 | S65555 | N, B, J | (Glutamate metabolism, Glutathione metabolism) |
| 20817 | 582 | AI012589 | M, N | (Glutathione metabolism, Multi-Drug Resistance Factors) |
| 20818 | 1498 | X02904 | M, N | (Glutathione metabolism, Multi-Drug Resistance Factors) |
| 1399 | 1508 | X07467 | M, H, I | (Glutathione metabolism, Pentose phosphate pathway) |
| 35 | 1260 | M33822 | C | (Glutathione metabolism, Prostaglandin and leukotriene metabolism, |
| | | | | Selenoamino acid metabolism, Taurine and hypotaurine metabolism) |
| 33 | 1500 | X03518 | N | (Glutathione metabolism, Prostaglandin and leukotriene metabolism, |
| | | | | Selenoamino acid metabolism, Taurine and hypotaurine metabolism) |
| 23109 | 1072 | D10854 | N | (Glycerolipid metabolism, Glycolysis/Gluconeogenesis, Pentose |
| | | | | and glucuronate interconversions) |
| 755 | 1100 | D38448 | M, N | (Glycerolipid metabolism, Phosphatidylinositol signaling system) |
| 754 | 1336 | NM_013126 | N | (Glycerolipid metabolism, Phosphatidylinositol signaling system) |
| 25279 | 1092 | D30740 | C | (Glycerolipid metabolism, Phospholipid degradation, Prostaglandin |
| | | | | and leukotriene metabolism) |
| 16147 | 1459 | U51898 | M, N | (Glycerolipid metabolism, Phospholipid degradation, Prostaglandin |
| | | | | and leukotriene metabolism) |
| 1535 | 437 | AB000778 | F | (Glycerolipid metabolism, Phospholipid degradation, Rac 1 cell |
| | | | | motility signaling pathway, Ras Signaling Pathway) |
| 16448 | 1117 | D86297 | N | (Glycine, serine and threonine metabolism, Hemoglobin''s |
| | | | | Chaperone) |
| 291 | 1316 | M88347 | M, N, F | (Glycine, serine and threonine metabolism, Huntington's disease, |
| | | | | Methionine metabolism, Selenoamino acid metabolism) |
| 1312 | 1255 | M31788 | J | (Glycolysis/Gluconeogenesis, Glycolysis Pathway) |
| 20513 | 1503 | X05684 | N | (Glycolysis/Gluconeogenesis, Glycolysis Pathway, Purine |
| | | | | metabolism, Pyruvate metabolism) |
| 15876 | 241 | AA892582 | N, G | (Glycolysis/Gluconeogenesis, Histidine metabolism, Phenylalanine |
| | | | | metabolism, Tyrosine metabolism) |
| 18564 | 33 | AA800745 | M | (Hemoglobin''s Chaperone, Porphyrin and chlorophyll metabolism) |
| 25405 | 1230 | M18330 | N | (HIV-I Nef: negative effector of Fas and TNF, Phosphatidylinositol |
| | | | | signaling system) |
| 20809 | 1229 | M17069 | N, D | (Huntington's disease, Phosphatidylinositol signaling system) |
| 20518 | 1520 | X14265 | N | (Huntington's disease, Phosphatidylinositol signaling system) |
| 5733 | 1303 | M81855 | N | (Hypoxia and p53 in the Cardiovascular system, Multi-Drug |
| | | | | Resistance Factors) |
| 1698 | 1137 | J02679 | M, B, H, I | (Hypoxia and p53 in the Cardiovascular system, Sterol biosynthesis) |
| 16081 | 888 | AI179610 | N | (IL-10 Anti-inflammatory Signaling Pathway, Porphyrin and |
| | | | | chlorophyll metabolism) |
| 16080 | 1138 | J02722 | N | (IL-10 Anti-inflammatory Signaling Pathway, Porphyrin and |
| | | | | chlorophyll metabolism) |
| 10087 | 817 | AI171803 | M | (Inositol metabolism, Propanoate metabolism, Valine, leucine and |
| | | | | isoleucine degradation) |
| 17269 | 1322 | M93401 | M | (Inositol metabolism, Propanoate metabolism, Valine, leucine and |
| | | | | isoleucine degradation) |
| 14956 | 1286 | M64301 | N | (Inositol phosphate metabolism, MAPKinase Signaling Pathway, |
| | | | | Nicotinate and nicotinamide metabolism, Sphingoglycolipid |
| | | | | metabolism, Starch and sucrose metabolism) |
| 14957 | 1286 | M64301 | N | (Inositol phosphate metabolism, MAPKinase Signaling Pathway, |
| | | | | Nicotinate and nicotinamide metabolism, Sphingoglycolipid |
| | | | | metabolism, Starch and sucrose metabolism) |
| 6577 | 1506 | X06942 | F | (Inositol phosphate metabolism, MAPKinase Signaling Pathway, |
| | | | | Nicotinate and nicotinamide metabolism, Sphingoglycolipid |
| | | | | metabolism, Starch and sucrose metabolism) |
| 21029 | 24 | AA799981 | C | (Inositol phosphate metabolism, Nicotinate and nicotinamide |
| | | | | metabolism, Phosphatidylinositol signaling system, Sphingoglycolipid |
| | | | | metabolism, Starch and sucrose metabolism) |
| 1542 | 1614 | Z50144 | N, J | (Lysine biosynthesis, Lysine degradation, Tryptophan metabolism) |
| 23300 | 1488 | U84727 | N | (Malate-aspartate shuttle, Shuttle for transfer of acetyl groups from |
| | | | | mitochondria to the cytosol) |
| 20896 | 1475 | U64030 | A, F | (Mechanism of Gene Regulation by Peroxisome Proliferators via |
| | | | | PPARa(alpha), Pyrimidine metabolism) |
| 1069 | 1522 | X15096 | N | (Methane metabolism, Phenylalanine metabolism, Ribosome) |
| 15295 | 164 | AA875594 | M, H, I | (NFAT and Hypertrophy of the heart (Transcription in the broken |
| | | | | heart), mTOR Signaling Pathway) |
| 6782 | 838 | AI176170 | B | (NFAT and Hypertrophy of the heart (Transcription in the broken |
| | | | | heart), mTOR Signaling Pathway) |
| 15296 | 907 | AI228738 | N, H, I | (NFAT and Hypertrophy of the heart (Transcription in the broken |
| | | | | heart), mTOR Signaling Pathway) |
| 15297 | 1118 | D86641 | N, K | (NFAT and Hypertrophy of the heart (Transcription in the broken |
| | | | | heart), mTOR Signaling Pathway) |
| 18597 | 455 | AB013732 | N, B, H | (Nucleotide sugars metabolism, Pentose and glucuronate |
| | | | | interconversions, Starch and sucrose metabolism) |
| 21211 | 433 | AB000098 | C | (Oxidative phosphorylation, Ubiquinone biosynthesis) |
| 20173 | 1605 | Z11932 | N, C | (Oxidative phosphorylation, Ubiquinone biosynthesis) |
| 811 | 1110 | D63704 | M, I | (Pantothenate and CoA biosynthesis, Pyrimidine metabolism, beta- |
| | | | | Alanine metabolism) |
| 812 | 1110 | D63704 | M, I | (Pantothenate and CoA biosynthesis, Pyrimidine metabolism, beta- |
| | | | | Alanine metabolism) |
| 1508 | 1332 | M97662 | N, G | (Pantothenate and CoA biosynthesis, Pyrimidine metabolism, beta- |
| | | | | Alanine metabolism) |
| 24643 | 1477 | U68417 | N, K | (Pantothenate and CoA biosynthesis, Valine, leucine and isoleucine |
| | | | | biosynthesis, Valine, leucine and isoleucine degradation) |
| 24582 | 1528 | X16554 | D | (Pentose phosphate pathway, Purine metabolism) |
| 1847 | 1529 | X16555 | B | (Pentose phosphate pathway, Purine metabolism) |
| 6055 | 1218 | M12337 | M, N, D | (Phenylalanine, tyrosine and tryptophan biosynthesis, Tryptophan |
| | | | | metabolism) |
| 13485 | 1057 | AJ012603 | B | (Presenilin action in Notch and Wnt signaling, Proteolysis and |
| | | | | Signaling Pathway of Notch, g-Secretase mediated ErbB4 Signaling |
| | | | | Pathway) |
| 24885 | 1088 | D25224 | N | (Prion disease, Ribosome) |
| 20481 | 1240 | M22631 | M, N, G, K | (Propanoate metabolism, Valine, leucine and isoleucine degradation) |
| 1928 | 1418 | U10357 | N | (PTEN dependent cell cycle arrest and apoptosis, Regulation of |
| | | | | elF4e and p70 S6 Kinase, Skeletal muscle hypertrophy is regulated |
| | | | | via AKT/mTOR pathway, mTOR Signaling Pathway) |
| 1929 | 1418 | U10357 | N, A, C, D, E | (PTEN dependent cell cycle arrest and apoptosis, Regulation of |
| | | | | elF4e and p70 S6 Kinase, Skeletal muscle hypertrophy is regulated |
| | | | | via AKT/mTOR pathway, mTOR Signaling Pathway) |
| 23709 | 1356 | NM_138532 | N | (Purine metabolism, Pyrimidine metabolism) |
| 1570 | 1404 | U05014 | A | (Regulation of elF4e and p70 S6 Kinase, Skeletal muscle |
| | | | | hypertrophy is regulated via AKT/mTOR pathway, mTOR Signaling |
| | | | | Pathway) |
| 355 | 1375 | S66024 | N | (Regulation of Spermatogenesis by CREM, Repression of Pain |
| | | | | Sensation by the Transcriptional Regulator DREAM) |
| 356 | 1375 | S66024 | N | (Regulation of Spermatogenesis by CREM, Repression of Pain |
| | | | | Sensation by the Transcriptional Regulator DREAM) |
| 17104 | 1251 | M29358 | M, G | (Ribosome, Skeletal muscle hypertrophy is regulated via AKT/mTOR |
| | | | | pathway, mTOR Signaling Pathway) |
| 17105 | 1251 | M29358 | N | (Ribosome, Skeletal muscle hypertrophy is regulated via AKT/mTOR |
| | | | | pathway, mTOR Signaling Pathway) |
| 605 | 1199 | L27340 | C | (Sonic Hedgehog (SHH) Receptor Ptc1 Regulates cell cycle, Sonic |
| | | | | Hedgehog (Shh) Pathway) |
| 16681 | 1095 | D37920 | N, B, L | (Sterol biosynthesis, Terpenoid biosynthesis) |
| 15069 | 1319 | M89945 | H | (Sterol biosynthesis, Terpenoid biosynthesis) |
| 25460 | 1319 | M89945 | N | (Sterol biosynthesis, Terpenoid biosynthesis) |
| 16449 | 1327 | M95591 | N | (Sterol biosynthesis, Terpenoid biosynthesis) |
| 16450 | 1327 | M95591 | N | (Sterol biosynthesis, Terpenoid biosynthesis) |
| 19058 | 493 | AF054618 | E | Agrin in Postsynaptic Differentiation |
| 18008 | 1350 | NM_031588 | N | Agrin in Postsynaptic Differentiation |
| 18005 | 1401 | U02320 | N | Agrin in Postsynaptic Differentiation |
| 18011 | 1402 | U02322 | M, H | Agrin in Postsynaptic Differentiation |
| 347 | 1400 | U01914 | D | AKAP95 role in mitosis and chromosome dynamics |
| 439 | 1609 | Z22607 | N, F | ALK in cardiac myocytes |
| 1515 | 1064 | D10233 | J | Aminosugars metabolism |
| 9125 | 67 | AA819338 | N | Amyotrophic lateral sclerosis (ALS) |
| 8426 | 483 | AF036335 | N, E, F | Antisense Pathway |
| 23778 | 298 | AA899854 | N, E | Apoptotic DNA fragmentation and tissue homeostasis |
| 19110 | 1289 | M64986 | A, J | Apoptotic DNA fragmentation and tissue homeostasis |
| 23780 | 1608 | Z19552 | E | Apoptotic DNA fragmentation and tissue homeostasis |
| 14638 | 765 | AI137049 | J | ATM Signaling Pathway |
| 16398 | 1478 | U75392 | N | CARM1 and Regulation of the Estrogen Receptor |
| 6758 | 592 | AI013394 | B, L | Chondroitin/Heparan sulfate biosynthesis |
| 15385 | 249 | AA892808 | N | Citrate cycle (TCA cycle) |
| 19991 | 730 | AI103956 | K | Citrate cycle (TCA cycle) |
| 17516 | 847 | AI176621 | A, E, L | Citrate cycle (TCA cycle) |
| 7197 | 820 | AI171962 | M, G, K, L | Corticosteroids and cardioprotection |
| 7196 | 1371 | S57478 | M, E, G, K | Corticosteroids and cardioprotection |
| 16354 | 1108 | D50564 | N, C | Cysteine metabolism |
| 1081 | 466 | AF013145 | M, D | Downregulated of MTA-3 in ER-negative Breast Tumors |
| 19998 | 964 | AI232999 | M | Downregulated of MTA-3 in ER-negative Breast Tumors |
| 1462 | 999 | AI235585 | M, E, G | Downregulated of MTA-3 in ER-negative Breast Tumors |
| 1463 | 1540 | X54467 | M, G, K | Downregulated of MTA-3 in ER-negative Breast Tumors |
| 17563 | 875 | AI178750 | N | Eukaryotic protein translation |
| 24874 | 1410 | U07619 | N | Extrinsic Prothrombin Activation Pathway |
| 20711 | 307 | AA924267 | N, L | Fatty acid metabolism |
| 15926 | 451 | AB012933 | D | Fatty acid metabolism |
| 20983 | 634 | AI044900 | K | Fatty acid metabolism |
| 18687 | 804 | AI170568 | N | Fatty acid metabolism |
| 18686 | 1062 | D00729 | N | Fatty acid metabolism |
| 6780 | 1160 | J05029 | N | Fatty acid metabolism |
| 20713 | 1275 | M57718 | N, J, L | Fatty acid metabolism |
| 20715 | 1507 | X07259 | N, L | Fatty acid metabolism |
| 15540 | 1243 | M24067 | K | Fibrinolysis Pathway |
| 13479 | 1149 | J03481 | N | Folate biosynthesis |
| 13480 | 1149 | J03481 | N | Folate biosynthesis |
| 21400 | 1266 | M36410 | C, F | Folate biosynthesis |
| 1527 | 1299 | M77850 | B | Folate biosynthesis |
| 16726 | 1352 | NM_031855 | M, N, E, G, H, I | Fructose and mannose metabolism |
| 1877 | 1579 | X74593 | A, D, E | Fructose and mannose metabolism |
| 1214 | 1076 | D13871 | M, N, K | FXR and LXR Regulation of Cholesterol Metabolism |
| 19712 | 1429 | U18374 | K | FXR and LXR Regulation of Cholesterol Metabolism |
| 5384 | 166 | AA891041 | I | GATA3 participate in activating the Th2 cytokine genes expression |
| 989 | 1464 | U56242 | N, D, F | GATA3 participate in activating the Th2 cytokine genes expression |
| 20161 | 1543 | X54686 | M, C, I | GATA3 participate in activating the Th2 cytokine genes expression |
| 5206 | 327 | AA925755 | E | Glutamate metabolism |
| 20717 | 844 | AI176504 | N | Glutamate metabolism |
| 11153 | 1320 | M91652 | N | Glutamate metabolism |
| 4615 | 1061 | D00680 | N | Glutathione metabolism |
| 21011 | 1128 | H32189 | N | Glutathione metabolism |
| 21012 | 1133 | J02592 | N, B | Glutathione metabolism |
| 21013 | 1144 | J02810 | N | Glutathione metabolism |
| 15017 | 1153 | J03752 | N, B | Glutathione metabolism |
| 21014 | 1155 | J03914 | B, L | Glutathione metabolism |
| 18989 | 1168 | K00136 | N | Glutathione metabolism |
| 634 | 1170 | K01932 | N | Glutathione metabolism |
| 25525 | 1383 | S72505 | N | Glutathione metabolism |
| 635 | 1586 | X78848 | N | Glutathione metabolism |
| 20753 | 43 | AA801441 | M, N, C, I | Glycerolipid metabolism |
| 22554 | 353 | AA945076 | M, I | Glycerolipid metabolism |
| 3512 | 442 | AB006607 | F | Glycerolipid metabolism |
| 1306 | 1065 | D10262 | N | Glycerolipid metabolism |
| 17684 | 220 | AA892345 | M, I | Glycine, serine and threonine metabolism |
| 21587 | 293 | AA899141 | D | Glycine, serine and threonine metabolism |
| 21038 | 1148 | J03190 | H | Glycine, serine and threonine metabolism |
| 21039 | 1148 | J03190 | H | Glycine, serine and threonine metabolism |
| 1550 | 1504 | X06150 | N | Glycine, serine and threonine metabolism |
| 1551 | 1504 | X06150 | N, G | Glycine, serine and threonine metabolism |
| 21585 | 1596 | X97772 | D | Glycine, serine and threonine metabolism |
| 21586 | 1596 | X97772 | D | Glycine, serine and threonine metabolism |
| 187 | 1094 | D32209 | F | Granzyme A mediated Apoptosis Pathway |
| 20801 | 1104 | D44495 | M, N, H, I, J, L | Granzyme A mediated Apoptosis Pathway |
| 1685 | 97 | AA851497 | J | Hemoglobin''s Chaperone |
| 17832 | 573 | AI012182 | J | Hemoglobin''s Chaperone |
| 17833 | 868 | AI177992 | F | Hemoglobin''s Chaperone |
| 17829 | 884 | AI179576 | N, J | Hemoglobin''s Chaperone |
| 1687 | 890 | AI179971 | J | Hemoglobin''s Chaperone |
| 1688 | 932 | AI230970 | J | Hemoglobin''s Chaperone |
| 1689 | 1009 | AI236360 | J | Hemoglobin''s Chaperone |
| 25468 | 1324 | M94918 | N, J | Hemoglobin''s Chaperone |
| 1684 | 1547 | X56325 | J | Hemoglobin''s Chaperone |
| 3610 | 776 | AI145151 | M, G, I, J | Histidine metabolism |
| 3608 | 1067 | D10693 | M, J | Histidine metabolism |
| 3609 | 1395 | S82579 | N, F | Histidine metabolism |
| 17154 | 1228 | M15883 | J | Huntington's disease |
| 15097 | 535 | AI009405 | N | Hypoxia and p53 in the Cardiovascular system |
| 1424 | 1423 | U14746 | N | Hypoxia-Inducible Factor in the Cardiovascular System |
| 4392 | 906 | AI228674 | H | IL-2 Receptor Beta Chain in T cell Activation |
| 15393 | 806 | AI170663 | J | Inactivation of Gsk3 by AKT causes accumulation of b-catenin in |
| | | | | Alveolar Macrophages |
| 7888 | 976 | AI233583 | M | Inhibition of Matrix Metalloproteinases |
| 17550 | 565 | AI011607 | M, I | Lysine degradation |
| 1814 | 1253 | M31174 | N | Map Kinase Inactivation of SMRT Corepressor |
| 15701 | 447 | AB010467 | A, I | Multi-Drug Resistance Factors |
| 21575 | 1544 | X55298 | J | N-Glycans biosynthesis |
| 12606 | 1281 | M59861 | N, E, K | One carbon pool by folate |
| 11953 | 703 | AI102505 | A | Oxidative phosphorylation |
| 11955 | 1212 | L48209 | N | Oxidative phosphorylation |
| 23225 | 1249 | M27467 | N | Oxidative phosphorylation |
| 11956 | 1250 | M28255 | N | Oxidative phosphorylation |
| 1598 | 1445 | U30186 | N | p38 MAPK Signaling Pathway |
| 11454 | 1245 | M24604 | M | p53 Signaling Pathway |
| 11455 | 1245 | M24604 | M | p53 Signaling Pathway |
| 24821 | 1066 | D10392 | J | Parkinson's disease |
| 16039 | 9 | AA799452 | H | Pentose phosphate pathway |
| 20804 | 567 | AI011684 | H | Pentose phosphate pathway |
| 20802 | 655 | AI059508 | N, H | Pentose phosphate pathway |
| 20803 | 1413 | U09256 | N, B, H, I | Pentose phosphate pathway |
| 1183 | 465 | AF013144 | N | Phosphatidylinositol signaling system |
| 14978 | 858 | AI177386 | F | Phosphatidylinositol signaling system |
| 245 | 1107 | D45412 | J | Phosphatidylinositol signaling system |
| 1712 | 1177 | L06096 | M | Phosphatidylinositol signaling system |
| 24219 | 1200 | L27843 | M, L | Phosphatidylinositol signaling system |
| 1844 | 1261 | M33962 | J | Phosphatidylinositol signaling system |
| 1824 | 1427 | U17971 | K | Phosphatidylinositol signaling system |
| 247 | 1443 | U28938 | J | Phosphatidylinositol signaling system |
| 7700 | 744 | AI105383 | M, D | Phospholipids as signalling intermediaries |
| 23868 | 474 | AF023087 | M, L | Phosphorylation of MEK1 by cdk5/p35 down regulates the MAP |
| | | | | kinase pathway |
| 23872 | 1231 | M18416 | M | Phosphorylation of MEK1 by cdk5/p35 down regulates the MAP |
| | | | | kinase pathway |
| 23869 | 1479 | U75397 | L | Phosphorylation of MEK1 by cdk5/p35 down regulates the MAP |
| | | | | kinase pathway |
| 16521 | 557 | AI010470 | B, J, L | Porphyrin and chlorophyll metabolism |
| 16520 | 1204 | L33869 | M, B, C, L | Porphyrin and chlorophyll metabolism |
| 17554 | 1115 | D85100 | N | Propanoate metabolism |
| 15538 | 758 | AI112633 | L | Proteasome |
| 25253 | 1068 | D10754 | H | Proteasome |
| 15535 | 1069 | D10755 | L | Proteasome |
| 3254 | 1070 | D10756 | N, L | Proteasome |
| 4003 | 1071 | D10757 | N | Proteasome |
| 1884 | 1109 | D50695 | I | Proteasome |
| 3987 | 1122 | D90258 | M, N | Proteasome |
| 15470 | 1466 | U57050 | H | Proteasome |
| 1447 | 1545 | X55986 | D | Proteasome |
| 8888 | 81 | AA849036 | N, B | Purine metabolism |
| 14184 | 126 | AA859837 | M | Purine metabolism |
| 14185 | 126 | AA859837 | M | Purine metabolism |
| 2979 | 289 | AA894099 | H | Purine metabolism |
| 4327 | 501 | AF063447 | M, G, I | Purine metabolism |
| 1466 | 1222 | M14050 | N | Purine metabolism |
| 1246 | 1273 | M57507 | M, J | Purine metabolism |
| 1970 | 1446 | U31463 | N, K | Purine metabolism |
| 16708 | 1465 | U57042 | M, N | Purine metabolism |
| 20483 | 1524 | X15939 | N | Purine metabolism |
| 24235 | 169 | AA891286 | M, N, H, I | Pyrimidine metabolism |
| 24234 | 1474 | U63923 | M, A, I | Pyrimidine metabolism |
| 1409 | 589 | AI012802 | M, A, C, E, F | Pyruvate metabolism |
| 240 | 1297 | M75153 | N | Rab GTPases Mark Targets In The Endocytotic Machinery |
| 1867 | 91 | AA850940 | N | Ribosome |
| 20839 | 177 | AA891729 | N | Ribosome |
| 4259 | 207 | AA892123 | N | Ribosome |
| 20812 | 356 | AA945611 | N | Ribosome |
| 19268 | 530 | AI008641 | D | Ribosome |
| 815 | 603 | AI014087 | N | Ribosome |
| 16918 | 715 | AI103074 | N | Ribosome |
| 14929 | 802 | AI170353 | M, G, K | Ribosome |
| 18612 | 904 | AI228624 | G | Ribosome |
| 15468 | 997 | AI235364 | N | Ribosome |
| 19112 | 1036 | AI639157 | J | Ribosome |
| 10878 | 1174 | K03250 | N | Ribosome |
| 24615 | 1318 | M89646 | N, D | Ribosome |
| 15135 | 1382 | S71021 | N, G | Ribosome |
| 16204 | 1505 | X06423 | M, N, G | Ribosome |
| 16205 | 1505 | X06423 | N, F | Ribosome |
| 16847 | 1516 | X13549 | N | Ribosome |
| 9620 | 1535 | X53377 | N | Ribosome |
| 10267 | 1550 | X57432 | N | Ribosome |
| 16929 | 1571 | X66370 | G | Ribosome |
| 23854 | 1585 | X78327 | N, G | Ribosome |
| 11849 | 1593 | X93352 | M, N, G | Ribosome |
| 18107 | 1594 | X94242 | N | Ribosome |
| 4361 | 1127 | H31839 | N | Role of Mitochondria in Apoptotic Signaling |
| 8829 | 1271 | M55015 | M, A, F, K | SARS Coronavirus Protease |
| 18354 | 1559 | X59859 | J | Small Leucine-rich Proteoglycan (SLRP) molecules |
| 24192 | 306 | AA924210 | H | Sterol biosynthesis |
| 15242 | 459 | AB017912 | D | TGF beta signaling pathway |
| 15243 | 459 | AB017912 | N | TGF beta signaling pathway |
| 17324 | 495 | AF056031 | M | Tryptophan metabolism |
| 20493 | 1090 | D28339 | M, N | Tryptophan metabolism |
| 20494 | 1103 | D44494 | N, E | Tryptophan metabolism |
| 794 | 1476 | U68168 | M, I | Tryptophan metabolism |
| 23961 | 1298 | M77694 | M, N, E, G, I | Tyrosine metabolism |
| 15277 | 989 | AI234889 | D | Ubiquitin mediated proteolysis |
| 17378 | 1284 | M62388 | N, D | Ubiquitin mediated proteolysis |
| 15273 | 1421 | U13177 | E | Ubiquitin mediated proteolysis |
| 21950 | 599 | AI013861 | N, G | Valine, leucine and isoleucine degradation |
| 4449 | 712 | AI102838 | N, B, G, K | Valine, leucine and isoleucine degradation |
| 17284 | 1145 | J02827 | N, G | Valine, leucine and isoleucine degradation |
| 17285 | 1145 | J02827 | N | Valine, leucine and isoleucine degradation |
| 4450 | 1161 | J05031 | N, E | Valine, leucine and isoleucine degradation |
| 4451 | 1161 | J05031 | M, N, F | Valine, leucine and isoleucine degradation |
| 21072 | 28 | AA800211 | K | Vitamin B6 metabolism |
| 16248 | 1376 | S68135 | N | Vitamin C in the Brain |

[0270] TABLE 3

| GLGC | | GenBank Acc or | | | |
|---|---|---|---|---|---|
| Identifier | Seq ID | RefSeq ID | Model Code | Human Homologous Gene Name | Human Homologous Cluster Title |
| 22602 | 487 | AF044574 | M | (2,4-dienoyl CoA reductase 2, peroxisomal, 2-4-dienoyl- | (2,4-dienoyl CoA reductase 2, peroxisomal, 2-4-dienoyl-Coenzyme |
| | | | | Coenzyme A reductase 2, peroxisomal) | A reductase 2, peroxisomal) |
| 22603 | 487 | AF044574 | N | (2,4-dienoyl CoA reductase 2, peroxisomal, 2-4-dienoyl- | (2,4-dienoyl CoA reductase 2, peroxisomal, 2-4-dienoyl-Coenzyme |
| | | | | Coenzyme A reductase 2, peroxisomal) | A reductase 2, peroxisomal) |
| 2812 | 809 | AI171090 | J | (3-hydroxy-3-methylglutaryl-Coenzyme A lyase, 3-hydroxymethyl- | (3-hydroxy-3-methylglutaryl-Coenzyme A lyase, 3-hydroxymethyl-3- |
| | | | | 3-methylglutaryl-Coenzyme A lyase | methylglutaryl-Coenzyme A lyase (hydroxymethylglutaricaciduria)) |
| | | | | (hydroxymethylglutaricaciduria)) | |
| 24192 | 306 | AA924210 | H | (3-hydroxy-3-methylglutaryl-Coenzyme A reductase, HMG | 3-hydroxy-3-methylglutaryl-Coenzyme A reductase |
| | | | | Coenzyme A reductase, Hydroxymethylglutaryl-coA reductase) | |
| 15580 | 1258 | M33648 | N | (3-hydroxy-3-methylglutaryl-Coenzyme A synthase 2,3-hydroxy- | (3-hydroxy-3-methylglutaryl-Coenzyme A synthase2,3-hydroxy-3- |
| | | | | 3-methylglutaryl-Coenzyme A synthase 2 (mitochondrial), | methylglutaryl-Coenzyme A synthase 2 (mitochondrial)) |
| | | | | hydroxymethlglutaryl-CoA synthase) | |
| 16768 | 1083 | D16478 | N | (3-hydroxyacyl-CoA dehydrogenase, hydroxyacyl-Coenzyme A | hydroxyacyl-Coenzyme A dehydrogenase/3-ketoacyl-Coenzyme A |
| | | | | dehydrogenase/3-ketoacyl-Coenzyme A thiolase/enoyl- | thiolase/enoyl-Coenzyme A hydratase (trifunctional protein), alpha |
| | | | | Coenzyme A hydratase (trifunctional protein), alpha subunit) | subunit |
| 21950 | 599 | AI013861 | N, G | (3-HYDROXYISOBUTYRATE DEHYDROGENASE | (3-hydroxyisobutyrate dehydrogenase, RIKEN cDNA 6430402H10 |
| | | | | PRECURSOR (EC 1.1.1.31) (HIBADH) (FRAGMENT), 3- | gene) |
| | | | | hydroxyisobutyrate dehydrogenase, RIKEN cDNA 6430402H10 | |
| | | | | gene) | |
| 20427 | 1536 | X53378 | N | (40S ribosomal protein S13, Ribosomal protein S13, ribosomal | ribosomal protein S13 |
| | | | | protein S13) | |
| 815 | 603 | AI014087 | N | (40S ribosomal protein S26, Ribosomal protein S26, ribosomal | ribosomal protein S26 |
| | | | | protein S26, similar to 40S ribosomal protein S26) | |
| 17104 | 1251 | M29358 | M, G | (40S ribosomal protein S6, Ribosomal protein S6, ribosomal | ribosomal protein S6 |
| | | | | protein S6) | |
| 17105 | 1251 | M29358 | N | (40S ribosomal protein S6, Ribosomal protein S6, ribosomal | ribosomal protein S6 |
| | | | | protein S6) | |
| 24885 | 1088 | D25224 | N | (40S ribosomal protein, laminin receptor 1 (ribosomal protein | (laminin receptor 1 (ribosomal protein SA), laminin receptor 1 |
| | | | | SA), laminin receptor 1 (ribosomal protein SA. 67 kDa)) | (ribosomal protein SA, 67 kDa)) |
| 15468 | 997 | AI235364 | N | (40S ribosomal protein, ribosomal protein S15a) | ribosomal protein S15a |
| 1527 | 1299 | M77850 | B | (6-pyruvoyl-tetrahydropterin synthase, 6-pyruvoyltetrahydropterin | (6-pyruvoyl-tetrahydropterin synthase, 6-pyruvoyltetrahydropterin |
| | | | | synthase, purple) | synthase) |
| 21882 | 1308 | M83740 | M, N, D | (6-pyruvoyl-tetrahydropterin synthase/dimerization cofactor of | 6-pyruvoyl-tetrahydropterin synthase/dimerization cofactor of |
| | | | | hepatocyte nuclear factor 1 alpha (TCF1), pterin-4a- | hepatocyte nuclear factor 1 atpha (TCF1) |
| | | | | carbinolamine dehydratase) | |
| 13485 | 1057 | AJ012603 | B | (a disintegrin and metalloproteinase domain 17, a disintegrin and | (a disintegrin and metalloproteinase domain 17, a disintegrin and |
| | | | | metalloproteinase domain 17 (tumor necrosis factor, alpha. | metalloproteinase domain 17 (tumor necrosis factor, alpha, |
| | | | | converting enzyme)) | converting enzyme)) |
| 18956 | 1059 | D00512 | N | (acetoacetyl CoA thiolase, acetyl-Coenzyme A acetyltransferase | (acetyl-Coenzyme A acetyltransferase 1, acetyl-Coenzyme A |
| | | | | 1, acetyl-Coenzyme A acetyltransferase 1 (acetoacetyl | acetyltransferase 1 (acetoacetyl Coenzyme A thiolase)) |
| | | | | Coenzyme A thiolase)) | |
| 18958 | 1077 | D13921 | N | (acetoacetyl CoA thiolase, acetyl-Coenzyme A acetyltransferase | (acetyl-Coenzyme A acetyltransferase 1, acetyl-Coenzyme A |
| | | | | 1, acetyl-Coenzyme A acetyltransferase 1 (acetoacetyl | acetyltransferase 1 (acetoacetyl Coenzyme A thiolase)) |
| | | | | Coenzyme A thiolase)) | |
| 23698 | 1139 | J02749 | N, D | (acetyl-Coenzyme A acyltransferase 1, acetyl-Coenzyme A | (acetyl-Coenzyme A acyltransferase 1, acetyl-Coenzyme A |
| | | | | acyltransferase 1 (peroxisomal 3-oxoacyl-Coenzyme A thiolase)) | acyltransferase 1 (peroxisomal 3-oxoacyl-Coenzyme A thiolase)) |
| 23699 | 1139 | J02749 | N, D, E | (acetyl-Coenzyme A acyltransferase 1, acetyl-Coenzyme A | (acetyl-Coenzyme A acyltransferase 1, acetyl-Coenzyme A |
| | | | | acyltransferase 1 (peroxisomal 3-oxoacyl-Coenzyme A thiolase)) | acyltransferase 1 (peroxisomal 3-oxoacyl-Coenzyme A thiolase)) |
| 6780 | 1160 | J05029 | N | (acetyl-Coenzyme A dehydrogenase, long-chain, acyl-Coenzyme | (acetyl-Coenzyme A dehydrogenase, long-chain, acyl-Coenzyme A |
| | | | | A dehydrogenase, long chain) | dehdrogenase, long chain |
| 21078 | 1143 | J02791 | N, G | (acetyl-Coenzyme A dehydrogenase, medium chain, acyl-CoA | (acetyl-Coenzyme A dehydrogenase, medium chain, acyl-Coenzyme |
| | | | | dehydrogenase, acyl-Coenzyme A dehydrogenase, C-4 to C-12 | A dehydrogenase, C-4 to C-12 straight chain) |
| | | | | straight chain) | |
| 187 | 1094 | D32209 | F | (acidic (leucine-rich) nuclear phosphoprotein 32 family, member | acidic (leucine-rich) nuclear phosphoprotein 32 family, member A |
| | | | | A, ectodermal) | |
| 19991 | 730 | AI103956 | K | (Aconitase, Aconitate hydratase, aconitase 2, mitochondrial, | aconitase 2, mitochondrial |
| | | | | wu: fa10e03) | |
| 2098 | 25 | AA799995 | C | (Actin 5C, actin, beta, actin, beta, cytoplasmic) | (actin, beta, actin, beta, cytoplasmic) |
| 21165 | 78 | AA848941 | K | (actinin, alpha 1, alpha actinin, alpha-actinin) | actinin, alpha 1 |
| 21166 | 78 | AA848941 | K | (actinin, alpha 1, alpha actinin, alpha-actinin) | actinin, alpha 1 |
| 13633 | 576 | AI012335 | M | (activating transcription factor 4, activating transcription factor 4 | (activating transcription factor 4, activating transcription factor 4 (tax- |
| | | | | (tax-responsive enhancer element B67)) | responsive enhancer element B67)) |
| 13634 | 880 | AI179381 | M | (activating transcription factor 4, activating transcription factor 4 | (activating transcription factor 4, activating transcription factor 4 (tax- |
| | | | | (tax-responsive enhancer element B67)) | responsive enhancer element B67)) |
| 4449 | 712 | AI102838 | N, B, G, K | (acyl-CoA dehydrogenase, isovaleryl Coenzyme A | (isovaleryl Coenzyme A dehydrogenase, isovaleryl coenzyme A |
| | | | | dehydrogenase, isovaleryl coenzyme A dehydrogenase) | dehydrogenase) |
| 4450 | 1161 | J05031 | N, E | (acyl-CoA dehydrogenase, isovaleryl Coenzyme A | (isovaleryl Coenzyme A dehydrogenase, isovaleryl coenzyme A |
| | | | | dehydrogenase, isovaleryl coenzyme A dehydrogenase) | dehydrogenase) |
| 4451 | 1161 | J05031 | M, N, F | (acyl-CoA dehydrogenase, isovaleryl Coenzyme A | (isovaleryl Coenzyme A dehydrogenase, isovaleryl coenzyme A |
| | | | | dehydrogenase, isovaleryl coenzyme A dehydrogenase) | dehydrogenase) |
| 16150 | 11 | AA799489 | G | (ACYL-COENZYME A OXIDASE, PEROXISOMAL (EC 1.3.3.6) | acyl-Coenzyme A oxidase 1, palmitoyl |
| | | | | (PALMITOYL-COA OXIDASE) (AOX), acyl-Coenzyme A oxidase | |
| | | | | 1, palmitoyl, wu: fb59h12) | |
| 16148 | 1140 | J02752 | N | (ACYL-COENZYME A OXIDASE, PEROXISOMAL (EC 1.3.3.6) | acyl-Coenzyme A oxidase 1, palmitoyl |
| | | | | (PALMITOYL-COA OXIDASE) (AOX), acyl-Coenzyme A oxidase | |
| | | | | 1, palmitoyl, wu: fb59h12) | |
| 21696 | 346 | AA944324 | N, C | (ADP ribosylation factor 51F, ADP-ribosylation factor 6, | ADP-ribosylation factor 6 |
| | | | | Y116A8C.12.p) | |
| 7914 | 439 | AB002584 | N | (alanine-glyoxylate aminotransferase 2, aminotransferase, | alanine-glyoxylate aminotransferase 2 |
| | | | | similar to beta-alanine-pyruvate aminotransferase) | |
| 1540 | 1246 | M25073 | N | (alanyl (membrane) aminopeptidase, alanyl (membrane) | (alanyl (membrane) aminopeptidase, alanyl (membrane) |
| | | | | aminopeptidase (aminopeptidase N, aminopeptidase M, | aminopeptidase (aminopeptidase N, aminopeptidase M, microsomal |
| | | | | microsomal aminopeptidase, CD13, p150)) | aminopeptidase, CD13, p150)) |
| 22219 | 1578 | X72792 | N, F | (alcohol dehydrogenase 1 (class I), alcohol dehydrogenase 1C | (alcohol dehydrogenase 1 (class I), alcohol dehydrogenase 1C |
| | | | | (class I), gamma polypeptide) | (class I), gamma polypeptide) |
| 25070 | 1397 | S83279 | M, N | (alcohol dehydrogenase; non-specific lipid transfer protein, | hydroxysteroid (17-beta) dehydrogenase 4 |
| | | | | hydroxysteroid (17-beta) dehydrogenase 4) | |
| 15876 | 241 | AA892582 | N, G | (aldehyde dehydrogenase 3 family, memberA1, aldehyde | (aldehyde dehydrogenase 3 family, memberA1, aldehyde |
| | | | | dehydrogenase family 3, subfamily A1) | dehydrogenase family 3, subfamily A1) |
| 10087 | 817 | AI171803 | M | (aldehyde dehydrogenase 6 family, member A1, aldehyde | (aldehyde dehydrogenase 6 family, member A1, aldehyde |
| | | | | dehydrogenase family 6, subfamily A1, methylmalonate- | dehydrogenase family 6, subfamily A1) |
| | | | | semialdehyde dehydrogenase) | |
| 17269 | 1322 | M93401 | M | (aldehyde dehydrogenase 6 family, member A1, aldehyde | (aldehyde dehydrogenase 6 family, member A1, aldehyde |
| | | | | dehydrogenase family 6, subfamily A1, methylmalonate- | dehydrogenase family 6, subfamily A1) |
| | | | | semialdehyde dehydrogenase) | |
| 23884 | 1293 | M73714 | J | (aldehyde dehydrogenase, aldehyde dehydrogenase 3 family, | (aldehyde dehydrogenase 3 family, member A2, aldehyde |
| | | | | member A2, aldehyde dehydrogenase family 3, subfamily A2) | dehydrogenase family 3, subfamily A2) |
| 16884 | 723 | AI103758 | E | (aldehyde dehydrogenase, aldehyde dehydrogenase 9 family, | (aldehyde dehydrogenase 9 family, member A1, aldehyde |
| | | | | member A1, aldehyde dehydrogenase 9, subfamily A1) | dehydrogenase 9, subfamily A1) |
| 16885 | 739 | AI105188 | K | (aldehyde dehydrogenase, aldehyde dehydrogenase 9 family, | (aldehyde dehydrogenase 9 family, member A1, aldehyde |
| | | | | member A1, aldehyde dehydrogenase 9, subfamily A1) | dehydrogenase 9, subfamily A1) |
| 23109 | 1072 | D10854 | N | (aldo-keto reductase family 1, member A1 (aldehyde reductase), | (aldo-keto reductase family 1, member A1 (aldehyde reductase), |
| | | | | aldo-keto reductase family 1, member A4 (aldehyde reductase)) | aldo-keto reductase family 1, member A4 (aldehyde reductase)) |
| 23321 | 252 | AA892821 | M | (aldo-keto reductase family 7, member A2 (aflatoxin aldehyde | (aldo-keto reductase family 7, member A2 (aflatoxin aldehyde |
| | | | | reductase), aldo-keto reductase family 7, member A5 (aflatoxin | reductase), aldo-keto reductase family 7, member A5 (aflatoxin |
| | | | | aldehyde reductase), wu: fb71a02) | aldehyde reductase)) |
| 23322 | 252 | AA892821 | N | (aldo-keto reductase family 7, member A2 (aflatoxin aldehyde | (aldo-keto reductase family 7, member A2 (aflatoxin aldehyde |
| | | | | reductase), aldo-keto reductase family 7, member A5 (aflatoxin | reductase), aldo-keto reductase family 7, member A5 (aflatoxin |
| | | | | aldehyde reductase), wu: fb71a02) | aldehyde reductase)) |
| 14997 | 1150 | J03572 | N | (alkaline phosphatase 2, liver, alkaline phosphatase, | (alkaline phosphatase 2, liver, alkaline phosphatase, |
| | | | | liver/bone/kidney) | liver/bone/kidney) |
| 14996 | 1526 | X16038 | M, D | (alkaline phosphatase 2, liver, alkaline phosphatase, | (alkaline phosphatase 2, liver, alkaline phosphatase, |
| | | | | liver/bone/kidney) | liver/bone/kidney) |
| 16268 | 1419 | U10894 | N | (allograft inflammatory factor 1, sb: cb10) | allograft inflammatory factor 1 |
| 20741 | 510 | AF084186 | A, J | (alpha Spectrin, spectrin alpha 2, spectrin, alpha, non- | (spectrin alpha 2, spectrin, alpha, non-erythrocytic 1 (alpha-fodrin)) |
| | | | | erythrocytic 1 (alpha-fodrin)) | |
| 17196 | 942 | AI231519 | M, N, I | (alpha-N-acetylgalactosaminide alpha-2,6-sialyltransferase III, | (alpha-N-acetylgalactosaminide alpha-2,6-sialyltransferase III, |
| | | | | sialyltransferase 7 ((alpha-N-acetylneuraminyl 2,3-betagalactosyl- | sialyltransferase 7 ((alpha-N-acetylneuraminyl 2,3-betagalactosyl- |
| | | | | 1,3)-N-acetyl galactosaminide alpha-2,6-sialyltransferase) C) | 1,3)-N-acetyl galactosaminide alpha-2,6-sialyltransferase) C) |
| 1542 | 1614 | Z50144 | N, J | (aminoadipate aminotransferase, kynurenine aminotransferase | (L-kynurenine/alpha-aminoadipate aminotransferase, kynurenine |
| | | | | II) | aminotransferase II) |
| 16448 | 1117 | D86297 | N | (aminolevulinate, delta-, synthase 2 (sideroblastic/hypochromic | (aminolevulinate, delta-, synthase 2 (sideroblastic/hypochromic |
| | | | | anemia), aminolevulinic acid synthase 1) | anemia), aminolevulinic acid synthase 1) |
| 2079 | 1189 | L14462 | F | (amino-terminal enhancer of split, chico) | amino-terminal enhancer of split |
| 5329 | 646 | AI045970 | M | (amphiphysin, amphiphysin (Stiff-Man syndrome with breast | (amphiphysin, amphiphysin (Stiff-Man syndrome with breast cancer |
| | | | | cancer 128 kDa autoantigen)) | 128 kDa autoantigen)) |
| 21391 | 600 | AI013902 | M, K | (Annexin X, annexin A7) | annexin A7 |
| 20801 | 1104 | D44495 | M, N, H, I, J, L | (APEX nuclease (multifunctional DNA repair enzyme) 1, | (APEX nuclease (multifunctional DNA repair enzyme) 1, |
| | | | | apurinic/apyrimidinic endonuclease 1, hm: zehn1532) | apurinic/apyrimidinic endonuclease 1) |
| 1419 | 1492 | U90887 | N | (arginase type II, arginase, type II, wu: fb67g02) | (arginase type II, arginase, type II) |
| 4467 | 1274 | M57664 | N | (Arginine kinase, arginine kinase, creatine kinase, brain) | creatine kinase, brain |
| 20173 | 1605 | Z11932 | N, C | (arginine vasopressin receptor 2, arginine vasopressin receptor 2 | (arginine vasopressin receptor 2, arginine vasopressin receptor 2 |
| | | | | (nephrogenic diabetes insipidus)) | (nephrogenic diabetes insipidus)) |
| 4234 | 457 | AB016536 | N, K | (argininosuccinate lyase, heterogeneous nuclear | (argininosuccinate lyase, heterogeneous nuclear ribonucleoprotein |
| | | | | ribonucleoprotein A/B) | A/B) |
| 20597 | 1512 | X12459 | N | (argininosuccinate synthetase, argininosuccinate synthetase 1) | (argininosuccinate synthetase, argininosuccinate synthetase 1) |
| 17630 | 201 | AA892012 | N | (Aspartate aminotransferase, glutamate oxaloacetate | (glutamate oxaloacetate transaminase 2, mitochondrial, glutamic- |
| | | | | transaminase 2, mitochondrial, glutamic-oxaloacetic | oxaloacetic transaminase 2, mitochondrial (aspartate |
| | | | | transaminase 2, mitochondrial (aspartate aminotransferase 2)) | aminotransferase 2)) |
| 10789 | 947 | AI232059 | M | (aspartoacylase (aminoacylase 2, Canavan disease), | (aspartoacylase (aminoacylase 2, Canavan disease), |
| | | | | aspartoacylase (aminoacylase) 2) | aspartoacylase (aminoacylase) 2) |
| 20725 | 1541 | X54510 | A | (ATP synthase, H+ transporting, mitochondrial F0 complex, | (ATP synthase, H+ transporting, mitochondrial F0 complex, subunit |
| | | | | subunit F, ATP synthase, H+ transporting, mitochondrial F0 | F, ATP synthase, H+ transporting, mitochondrial F0 complex, |
| | | | | complex, subunit F6) | subunit F6) |
| 18449 | 1399 | U00926 | H | (ATP synthase, H+ transporting, mitochondrial F1 complex, delta | (ATP synthase, H+ transporting, mitochondrial F1 complex, delta |
| | | | | subunit, RIKEN cDNA 0610008F14 gene) | subunit, RIKEN cDNA 0610008F14 gene) |
| 12349 | 5 | AA799276 | M | (ATPase, Ca++ transporting, cardiac muscle, slow twitch 2, | ATPase, Ca++ transporting, cardiac muscle, slow twitch 2 |
| | | | | Calcium ATPase at 60A, E1-E2 ATPases) | |
| 20841 | 1279 | M58758 | H | (ATPase, H+ transporting, lysosomal V0 subunit a isoform 1, | ATPase, H+ transporting, lysosomal V0 subunit a isoform 1 |
| | | | | CLATHRIN-COATED VESICLE/SYNAPTIC VESICLE PROTON | |
| | | | | PUMP 116 KD SUBUNIT (EC 3.6.1.34)) | |
| 23708 | 1335 | NM_013113 | N | (ATPase, Na+/K+ transporting, beta 1 polypeptide, ATPase, | ATPase, Na+/K+ transporting, beta 1 polypeptide |
| | | | | Na+/K+ transporting, beta 1a polypeptide) | |
| 23709 | 1356 | NM_138532 | N | (ATPase, Na+/K+ transporting, beta 1 polypeptide, ATPase, | (ATPase, Na+/K+ transporting, beta 1 polypeptide, non-metastatic |
| | | | | Na+/K+ transporting, beta 1a polypeptide, non-metastatic cells 7, | cells 7, protein expressed in, non-metastatic cells 7, protein |
| | | | | protein expressed in, non-metastatic cells 7, protein expressed in | expressed in (nucleoside-diphosphate kinase)) |
| | | | | (nucleoside-diphosphate kinase), nucleoside diphosphate kinase- | |
| | | | | Z4) | |
| 5733 | 1303 | M81855 | N | (ATP-binding cassette, sub-family B (MDR/TAP), member 1, | (ATP-binding cassette, sub-family B (MDR/TAP), member 1, ATP- |
| | | | | ATP-binding cassette, sub-family B (MDR/TAP), member 1A, | binding cassette, sub-family B (MDR/TAP), member 1A, ATP- |
| | | | | ATP-binding cassette, sub-family B (MDR/TAP), member 1B, | binding cassette, sub-family B (MDR/TAP), member 1B) |
| | | | | Multi drug resistance 49) | |
| 5565 | 362 | AA945879 | M, C | (Bardet-Biedl syndrome 2, Bardet-Biedl syndrome 2 homolog | (Bardet-Biedl syndrome 2, Bardet-Biedl syndrome 2 homolog |
| | | | | (human)) | (human)) |
| 8640 | 1073 | D12769 | D | (basic transcription element binding protein 1, similar to Kruppel- | basic transcription element binding protein 1 |
| | | | | like factor 9, wu: fi22b08) | |
| 16398 | 1478 | U75392 | N | (B-cell receptor-associated protein 37, Prohibitin, repressor of | (B-cell receptor-associated protein 37, repressor of estrogen |
| | | | | estrogen receptor activity) | receptor activity) |
| 19 | 1197 | L26268 | M | (B-cell translocation gene 1, anti-proliferative, similar to B-cell | B-cell translocation gene 1, anti-proliferative |
| | | | | translocation gene 1, anti-proliferative) | |
| 15300 | 1283 | M60921 | M | (B-cell translocation gene 2, anti-proliferative, BTG family, | (B-cell translocation gene 2, anti-proliferative, BTG family, member |
| | | | | member 2) | 2) |
| 15299 | 1340 | NM_017259 | M, I, J | (B-cell translocation gene 2, anti-proliferative, BTG family, | (B-cell translocation gene 2, anti-proliferative, BTG family, member |
| | | | | member 2) | 2) |
| 23679 | 511 | AF087037 | C, L | (B-cell translocation gene 3, BTG family, member 3) | (B-cell translocation gene 3, BTG family, member 3) |
| 23033 | 1355 | NM_080888 | A, C, K | (BCL2/adenovirus E1B 19 kDa interacting protein 3-like, | (BCL2/adenovirus E1B 19 kDa interacting protein 3-like, |
| | | | | BCL2/adenovirus E1B 19 kDa-interacting protein 3-like) | BCL2/adenovirus E1B 19 kDa-interacting protein 3-like) |
| 912 | 1468 | U59184 | N | (BCL2-associated X protein, Bcl2-associated X protein, bcl2- | (BCL2-associated X protein, Bcl2-associated X protein) |
| | | | | associated X protein) | |
| 14989 | 857 | AI177366 | M, K | (beta integrin, integrin beta 1 (fibronectin receptor beta), integrin, | (integrin beta 1 (fibronectin receptor beta), integrin, beta 1 |
| | | | | beta 1 (fibronectin receptor, beta polypeptide, antigen CD29 | (fibronectin receptor, beta polypeptide, antigen CD29 includes |
| | | | | includes MDF2, MSK12), myospheroid) | MDF2, MSK12)) |
| 1508 | 1332 | M97662 | N, G | (beta-ureidopropionase (rat), ureidopropionase, beta) | ureidopropionase, beta |
| 19824 | 1125 | E13557 | N, G, K | (black, cysteine sulfinic acid decarboxylase) | cysteine sulfinic acid decarboxylase |
| 19825 | 1288 | M64755 | N | (black, cysteine sulfinic acid decarboxylase) | cysteine sulfinic acid decarboxylase |
| 17887 | 830 | AI172414 | J | (brain protein 44-like, similar to apoptosis-regulating basic | brain protein 44-like |
| | | | | protein) | |
| 18503 | 783 | AI169021 | G | (calbindin 1, 28 kDa, calbindin-28K) | (calbindin 1, 28 kDa, calbindin-28K) |
| 18501 | 1254 | M31178 | N | (calbindin 1, 28 kDa, calbindin-28K) | (calbindin 1, 28 kDa, calbindin-28K) |
| 18502 | 1254 | M31178 | N, G, J | (calbindin 1, 28 kDa, calbindin-28K) | (calbindin 1, 28 kDa, calbindin-28K) |
| 15132 | 936 | AI231180 | G | (calcium regulated heat stable protein 1, calcium regulated heat | (calcium regulated heat stable protein 1, calcium regulated heat |
| | | | | stable protein 1, 24 kDa) | stable protein 1, 24 kDa) |
| 20809 | 1229 | M17069 | N, D | (calmodulin 2 (phosphorylase kinase, delta), similar to | calmodulin 2 (phosphorylase kinase, delta) |
| | | | | Calmodulin CMD-1 (16.8 kD) (cmd-1), wu: fb69c08) | |
| 25802 | 1353 | NM_031969 | G, K | (Calmodulin, calmodulin 1, calmodulin 1 (phosphorylase kinase, | (calmodulin 1, calmodulin 1 (phosphorylase kinase, delta)) |
| | | | | delta)) | |
| 20518 | 1520 | X14265 | N | (calmodulin, calmodulin 3, calmodulin 3 (phosphorylase kinase, | (calmodulin 3, calmodulin 3 (phosphorylase kinase, delta)) |
| | | | | delta)) | |
| 15035 | 1472 | U62897 | B | (carboxypeptidase, carboxypeptidase D, silver) | carboxypeptidase D |
| 15411 | 1178 | L07736 | N, B, L | (carnitine palmitoyltransferase 1, liver, carnitine | (carnitine palmitoyltransferase 1, liver, carnitine palmitoyltransferase |
| | | | | palmitoyltransferase 1A (liver), mitochondrial carnitine | 1A (liver)) |
| | | | | palmitoyltransferase I) | |
| 1977 | 1164 | J05470 | N, L | (carnitine palmitoyltransferase 2, carnitine palmitoyltransferase II, | (carnitine palmitoyltransferase 2, carnitine palmitoyltransferase II) |
| | | | | wu: fa03e08) | |
| 16116 | 475 | AF025670 | F | (caspase 6, caspase 6, apoptosis-related cysteine protease) | (caspase 6, caspase 6, apoptosis-related cysteine protease) |
| 15741 | 1214 | M11670 | N | (Catalase, catalase) | catalase |
| 1462 | 999 | AI235585 | M, E, G | (cathepsin D, cathepsin D (lysosomal aspartyl protease)) | (cathepsin D, cathepsin D (lysosomal aspartyl protease)) |
| 1463 | 1540 | X54467 | M, G, K | (cathepsin D, cathepsin D (lysosomal aspartyl protease)) | (cathepsin D, cathepsin D (lysosomal aspartyl protease)) |
| 20828 | 814 | AI171462 | M, E, K | (CD24a antigen, hypothetical gene supported by NM_013230; | (CD24a antigen, hypothetical gene supported by NM_013230; |
| | | | | AK026603; X69397; BC007674; D87667; M58664; S75311) | AK026603; X69397; BC007674; D87667; M58664; S75311) |
| 20829 | 1457 | U49062 | M, D | (CD24a antigen, hypothetical gene supported by NM_013230; | (CD24a antigen, hypothetical gene supported by NM_013230; |
| | | | | AK026603; X69397; BC007674; D87667; M58664; S75311) | AK026603; X69397; BC007674; D87667; M58664; S75311) |
| 20830 | 1457 | U49062 | M | (CD24a antigen, hypothetical gene supported by NM_013230; | (CD24a antigen, hypothetical gene supported by NM_013230; |
| | | | | AK026603; X69397; BC007674; D87667; M58664; S75311) | AK026603; X69397; BC007674; D87667; M58664; S75311) |
| 9332 | 952 | AI232210 | F | (CD99 antigen-like 2, MIC2 (monoclonal Imperial Cancer | (CD99 antigen-like 2, MIC2 (monoclonal Imperial Cancer Research |
| | | | | Research Fund 2)-like 1) | Fund 2)-like 1) |
| 21651 | 1560 | X60767 | N, E | (cdc2, cell division cycle 2 homolog A (S. pombe), cell division | (cell division cycle 2 homolog A (S. pombe), cell division cycle 2, G1 |
| | | | | cycle 2, G1 to S and G2 to M) | to S and G2 to M) |
| 2629 | 1598 | Y00396 | K | (cellular myelocytomatosis oncogene, myelocytomatosis | (myelocytomatosis oncogene, v-myc myelocytomatosis viral |
| | | | | oncogene, v-myc myelocytomatosis viral oncogene homolog | oncogene homolog (avian)) |
| | | | | (avian)) | |
| 20960 | 1106 | D45254 | D | (cellular nucleic acid binding protein, zinc finger protein 9 (a | (cellular nucleic acid binding protein, zinc finger protein 9 (a cellular |
| | | | | cellular retroviral nucleic acid binding protein)) | retroviral nucleic acid binding protein)) |
| 19936 | 385 | AA956517 | D | (ceroid-lipofuscinosis, neuronal 2, ceroid-lipofuscinosis, neuronal | (ceroid-lipofuscinosis, neuronal 2, ceroid-lipofuscinosis, neuronal 2, |
| | | | | 2, late infantile (Jansky-Bielschowsky disease), wu: fa01b09) | late infantile (Jansky-Bielschowsky disease)) |
| 11429 | 798 | AI169706 | H | (ceroid-lipofuscinosis, neuronal 2, ceroid-lipofuscinosis, neuronal | (ceroid-lipofuscinosis, neuronal 2, ceroid-lipofuscinosis, neuronal 2, |
| | | | | 2, late infantile (Jansky-Bielschowsky disease), wu: fa01b09) | late infantile (Jansky-Bielschowsky disease)) |
| 16521 | 557 | AI010470 | B, J, L | (ceruloplasmin, ceruloplasmin (ferroxidase)) | (ceruloplasmin, ceruloplasmin (ferroxidase)) |
| 16520 | 1204 | L33869 | M, B, C, L | (ceruloplasmin, ceruloplasmin (ferroxidase)) | (ceruloplasmin, ceruloplasmin (ferroxidase)) |
| 4330 | 60 | AA818747 | M, B | (chemokine (C—X—C motif) ligand 12, chemokine (C—X—C motif) | (chemokine (C—X—C motif) ligand 12, chemokine (C—X—C motif) ligand |
| | | | | ligand 12 (stromal cell-derived factor 1)) | 12 (stromal cell-derived factor 1)) |
| 24321 | 956 | AI232340 | M, K, L | (chemokine (C—X—C motif) ligand 12, chemokine (C—X—C motif) | (chemokine (C—X—C motif) ligand 12, chemokine (C—X—C motif) ligand |
| | | | | ligand 12 (stromal cell-derived factor 1)) | 12 (stromal cell-derived factor 1)) |
| 17535 | 513 | AF090306 | N, E | (Chromatin assembly factor 1 subunit, retinoblastoma binding | retinoblastoma binding protein 7 |
| | | | | protein 7) | |
| 16552 | 1449 | U36482 | L | (chromosome 12 open reading frame 8, endoplasmic reticulum | (chromosome 12 open reading frame 8, endoplasmic reticulum |
| | | | | protein 29) | protein 29) |
| 20682 | 1482 | U75917 | B | (Clathrin coat assembly protein, adaptor-related protein complex | adaptor-related protein complex 2, sigma 1 subunit |
| | | | | 2, sigma 1 subunit, similar to clathrin-associated protein 17 - rat) | |
| 17154 | 1228 | M15883 | J | (clatherin, light polypeptide (Lcb), similar to Clathrin light chain B | clathrin, light polypeptide (Lcb) |
| | | | | (Lcb)) | |
| 7101 | 1287 | M64733 | M, E | (clusterin, clusterin (complement lysis inhibitor, SP-40, 40, | (clusterin, clusterin (complement lysis inhibitor, SP-40, 40, sulfated |
| | | | | sulfated glycoprotein 2, testosterone-repressed prostate | glycoprotein 2, testosterone-repressed prostate message 2, |
| | | | | message 2, apolipoprotein J)) | apolipoprotein J)) |
| 24874 | 1410 | U07619 | N | (coagulation factor III, coagulation factor III (thromboplastin, | (coagulation factor III, coagulation factor III (thromboplastin, tissue |
| | | | | tissue factor)) | factor)) |
| 15364 | 742 | AI105348 | J | (cofilin 1 (non-muscle), similar to cofilin 1, non-muscle) | cofilin 1 (non-muscle) |
| 16610 | 1091 | D28557 | N, E, L | (cold shock domain protein A, ypsilon schachtel) | cold shock domain protein A |
| 811 | 1110 | D63704 | M, I | (Collapsin Response Mediator Protein, Ulip like protein, | dihydropyrimidinase |
| | | | | dihydropyrimidinase) | |
| 812 | 1110 | D63704 | M, I | (Collapsin Response Mediator Protein, Ulip like protein, | dihydropyrimidinase |
| | | | | dihydropyrimidinase) | |
| 15851 | 1453 | U42719 | M | (complement component 4 (within H—2S), complement | (complement component 4 (within H—2S), complement component |
| | | | | component 4B) | 4B) |
| 15393 | 806 | AI170663 | J | (connexin 43, gap junction membrane channel protein alpha 1, | (gap junction membrane channel protein alpha 1, gap junction |
| | | | | gap junction protein, alpha 1, 43 kDa (connexin 43)) | protein, alpha 1, 43 kDa (connexin 43)) |
| 3125 | 934 | AI231028 | K | (coracle, erythrocyte membrane protein band 4.1-like 1, | (erythrocyte membrane protein band 4.1-like 1, erythrocyte protein |
| | | | | erythrocyte membrane protein band 4.1-like 3, erythrocyte | band 4.1-like 1) |
| | | | | protein band 4.1-like 1) | |
| 1727 | 461 | AF001417 | M | (core promoter element binding protein, zinc finger protein) | core promoter element binding protein |
| 21695 | 231 | AA892506 | N, G | (coronin, actin binding protein 1A, coronin, actin binding protein, | (coronin, actin binding protein 1A, coronin, actin binding protein, 1A) |
| | | | | 1A) | |
| 19058 | 493 | AF054618 | E | (Cortactin, cortactin, ems1 sequence (mammary tumor and | (cortactin, ems1 sequence (mammary tumor and squamous cell |
| | | | | squamous cell carcinoma-associated (p80/85 src substrate)) | carcinoma-associated (p80/85 src substrate)) |
| 13723 | 1272 | M55534 | N, K | (crystallin, alpha A, crystallin, alpha B) | crystallin, alpha B |
| 16407 | 471 | AF022247 | N | (cubilin (intrinsic factor-cobalamin receptor), similar to cubilin; | cubilin (intrinsic factor-cobalamin receptor) |
| | | | | cubilin (intrinsic factor-cobalamin receptor)) | |
| 20876 | 1238 | M21060 | J | (Cu—Zn superoxide dismutase, similar to superoxide dismutase 1, | superoxide dismutase 1, soluble (amyotrophic lateral sclerosis 1 |
| | | | | soluble, superoxide dismutase 1, soluble (amyotrophic lateral | (adult)) |
| | | | | sclerosis 1 (adult))) | |
| 11434 | 1079 | D14014 | N, B | (cyclin D1, cyclin D1 (PRAD1: parathyroid adenomatosis 1)) | (cyclin D1, cyclin D1 (PRAD1: parathyroid adenomatosis 1)) |
| 24232 | 1359 | NM_171992 | B | (cyclin D1, cyclin D1 (PRAD1: parathyroid adenomatosis 1)) | (cyclin D1, cyclin D1 (PRAD1: parathyroid adenomatosis 1)) |
| 133 | 1436 | U24174 | N | (cyclin-dependent kinase inhibitor 1A (P21), cyclin-dependent | (cyclin-dependent kinase inhibitor 1A (P21), cyclin-dependent kinase |
| | | | | kinase inhibitor 1A (p21, Cip1)) | inhibitor 1A (p21, Cip1)) |
| 18452 | 1085 | D17370 | M, N | (cystathionase (cystathionine gamma-lyase), cystathionine | cystathionase (cystathionine gamma-lyase) |
| | | | | gamma-lyase, wu: fb48e03) | |
| 18453 | 1085 | D17370 | N, G | (cystathionase (cystathionine gamma-lyase), cystathionine | cystathionase (cystathionine gamma-lyase) |
| | | | | gamma-lyase, wu: fb48e03) | |
| 291 | 1316 | M88347 | M, N, F | (cystathionine beta-synthase, cystathionine-beta-synthase, | (cystathionine beta-synthase, cystathionine-beta-synthase) |
| | | | | wu: fq06c06) | |
| 13392 | 982 | AI234146 | M | (cysteine and glycine-rich protein 1, cysteine rich protein 1) | (cysteine and glycine-rich protein 1, cysteine rich protein 1) |
| 3431 | 846 | AI176595 | N | (Cysteine proteinase-1, cathepsin L, cathepsin L2, cathepsin-like | (cathepsin L, cathepsin L2) |
| | | | | protease, hatching gland gene 1) | |
| 19543 | 1455 | U44948 | N | (cysteine rich protein 2, cysteine-rich protein 2) | (cysteine rich protein 2, cysteine-rich protein 2) |
| 23225 | 1249 | M27467 | N | (cytochrome c oxidase subunit VIc, cytochrome c oxidase, | (cytochrome c oxidase subunit VIc, cytochrome c oxidase, subunit |
| | | | | subunit VIc) | VIc) |
| 1921 | 1123 | E01524 | N | (Cytochrome P450 reductase, NADPH-cytochrome P450, P450 | P450 (cytochrome) oxidoreductase |
| | | | | (cytochrome) oxidoreductase) | |
| 1920 | 1213 | M10068 | N | (Cytochrome P450 reductase, NADPH-cytochrome P450, P450 | P450 (cytochrome) oxidoreductase |
| | | | | (cytochrome) oxidoreductase) | |
| 4011 | 496 | AF056333 | N, J | (cytochrome P450, family 2, subfamily E, polypeptide 1, | (cytochrome P450, family 2, subfamily E, polypeptide 1, cytochrome |
| | | | | cytochrome P450, family 2, subfamily e, polypeptide 1) | P450, family 2, subfamily e, polypeptide 1) |
| 4012 | 1367 | S48325 | N, J | (cytochrome P450, family 2, subfamily E, polypeptide 1, | (cytochrome P450, family 2, subfamily E, polypeptide 1, cytochrome |
| | | | | cytochrome P450, family 2, subfamily e, polypeptide 1) | P450, family 2, subfamily e, polypeptide 1) |
| 67 | 1268 | M37828 | B | (cytochrome P450, family 4, subfamily A, polypeptide 11, | (cytochrome P450, family 4, subfamily A, polypeptide 11, |
| | | | | cytochrome P450, family 4, subfamily a, polypeptide 12) | cytochrome P450, family 4, subfamily a, polypeptide 12) |
| 20716 | 1323 | M94548 | G | (cytochrome P450, family 4, subfamily F, polypeptide 2, | (cytochrome P450, family 4, subfamily F, polypeptide 2, cytochrome |
| | | | | cytochrome P450, family 4, subfamily f, polypeptide 14) | P450, family 4, subfamily f, polypeptide 14) |
| 17473 | 544 | AI009806 | M, N, K | (Cytoplasmic dynein light chain 2, dynein, cytoplasmic, light | (dynein, cytoplasmic, light chain 1, dynein, cytoplasmic, light |
| | | | | chain 1, dynein, cytoplasmic, light polypeptide 1) | polypeptide 1) |
| 1762 | 1147 | J03179 | N | (D site albumin promoter binding protein, D site of albumin | (D site albumin promoter binding protein, D site of albumin promoter |
| | | | | promoter (albumin D-box) binding protein) | (albumin D-box) binding protein) |
| 1763 | 1147 | J03179 | N | (D site albumin promoter binding protein, D site of albumin | (D site albumin promoter binding protein, D site of albumin promoter |
| | | | | promoter (albumin D-box) binding protein) | (albumin D-box) binding protein) |
| 21587 | 293 | AA899141 | D | (D-3-Phosphoglycerate dehydrogenase, phosphoglycerate | phosphoglycerate dehydrogenase |
| | | | | dehydrogenase, similar to D-3-phosphoglycerate dehydrogenase | |
| | | | | (3-PGDH)) | |
| 21585 | 1596 | X97772 | D | (D-3-Phosphoglycerate dehydrogenase, phosphoglycerate | phosphoglycerate dehydrogenase |
| | | | | dehydrogenase, similar to D-3-phosphoglycerate dehydrogenase | |
| | | | | (3-PGDH)) | |
| 21586 | 1596 | X97772 | D | (D-3-Phosphoglycerate dehydrogenase, phosphoglycerate | phosphoglycerate dehydrogenase |
| | | | | dehydrogenase, similar to D-3-phosphoglycerate dehydrogenase | |
| | | | | (3-PGDH)) | |
| 4327 | 501 | AF063447 | M, G, I | (DEAD (Asp-Glu-Ala-Asp) box polypeptide 39, Helicase at 25E) | (DEAD (Asp-Glu-Ala-Asp) box polypeptide 39, DEAD/H (Asp-Glu- |
| | | | | | Ala-Asp/His) box polypeptide 39) |
| 12422 | 1053 | AJ006971 | N | (death-associated kinase 3, death-associated protein kinase 3) | (death-associated kinase 3, death-associated protein kinase 3) |
| 12423 | 1053 | AJ006971 | N | (death-associated kinase 3, death-associated protein kinase 3) | (death-associated kinase 3, death-associated protein kinase 3) |
| 755 | 1100 | D38448 | M, N | (diacylglycerol kinase, gamma, diacylglycerol kinase, gamma | (diacylglycerol kinase, gamma, diacylglycerol kinase, gamma |
| | | | | 90 kDa) | 90 kDa) |
| 754 | 1336 | NM_013126 | N | (diacylglycerol kinase, gamma, diacylglycerol kinase, gamma | (diacylglycerol kinase, gamma, diacylglycerol kinase, gamma |
| | | | | 90 kDa) | 90 kDa) |
| 13479 | 1149 | J03481 | N | (Dihydropteridine reductase, quininoid dihydropteridine | (quininoid dihydropteridine reductase, quinoid dihydropteridine |
| | | | | reductase, quinoid dihydropteridine reductase) | reductase) |
| 13480 | 1149 | J03481 | N | (Dihydropteridine reductase, quininoid dihydropteridine | (quininoid dihydropteridine reductase, quinoid dihydropteridine |
| | | | | reductase, quinoid dihydropteridine reductase) | reductase) |
| 7784 | 1157 | J04591 | M, N, I | (dipeptidylpeptidase 4, dipeptidylpeptidase 4 (CD26, adenosine | (dipeptidylpeptidase 4, dipeptidylpeptidase 4 (CD26, adenosine |
| | | | | deaminase complexing protein 2)) | deaminase complexing protein 2)) |
| 4504 | 1495 | U95178 | D | (disabled homolog 2 (Drosophila), disabled homolog 2, mitogen- | (disabled homolog 2 (Drosophila), disabled homolog 2, mitogen- |
| | | | | responsive phosphoprotein (Drosophila)) | responsive phosphoprotein (Drosophila)) |
| 25247 | 1054 | AJ011608 | N | (DNA primase, p49 subunit, primase, polypeptide 1, 49 kDa) | (DNA primase, p49 subunit, primase, polypeptide 1, 49 kDa) |
| 23718 | 381 | AA955790 | A | (DNA segment, Chr 3, MJeffers 1, NRAS-related gene) | (DNA segment, Chr 3, MJeffers 1, NRAS-related gene) |
| 23778 | 298 | AA899854 | N, E | (DNA topoisomerase II, Topoisomerase 2, topoisomerase (DNA) | (topoisomerase (DNA) II alpha, topoisomerase (DNA) II alpha |
| | | | | II alpha, topoisomerase (DNA) II alpha 170 kDa) | 170 kDa) |
| 23780 | 1608 | Z19552 | E | (DNA topoisomerase II, Topoisomerase 2, topoisomerase (DNA) | (topoisomerase (DNA) II alpha, topoisomerase (DNA) II alpha |
| | | | | II alpha, topoisomerase (DNA) II alpha 170 kDa) | 170 kDa) |
| 1598 | 1445 | U30186 | N | (DNA-damage inducible transcript 3, DNA-damage-inducible | (DNA-damage inducible transcript 3, DNA-damage-inducible |
| | | | | transcript 3) | transcript 3) |
| 23282 | 1491 | U90725 | A | (Dodeca-satellite-binding protein 1, high density lipoprotein | high density lipoprotein binding protein (vigilin) |
| | | | | binding protein (vigilin), high-density lipoprotein-binding protein) | |
| 18687 | 804 | AI170568 | N | (dodecenoyl-Coenzyme A delta isomerase (3,2 trans-enoyl- | (dodecenoyl-Coenzyme A delta isomerase (3,2 trans-enoyl- |
| | | | | Coenyme A isomerase), dodecenoyl-Coenzyme A delta | Coenyme A isomerase), dodecenoyl-Coenzyme A delta isomerase |
| | | | | isomerase (3,2 trans-enoyl-Coenzyme A isomerase)) | (3,2 trans-enoyl-Coenzyme A isomerase)) |
| 18686 | 1062 | D00729 | N | (dodecenoyl-Coenzyme A delta isomerase (3,2 trans-enoyl- | (dodecenoyl-Coenzyme A delta isomerase (3,2 trans-enoyl- |
| | | | | Coenyme A isomerase), dodecenoyl-Coenzyme A delta | Coenyme A isomerase), dodecenoyl-Coenzyme A delta isomerase |
| | | | | isomerase (3,2 trans-enoyl-Coenzyme A isomerase)) | (3,2 trans-enoyl-Coenzyme A isomerase)) |
| 1431 | 632 | AI044610 | D | (Dopa decarboxylase, aromatic-L-amino-acid decarboxylase, | (dopa decarboxylase, dopa decarboxylase (aromatic L-amino acid |
| | | | | dopa decarboxylase, dopa decarboxylase (aromatic L-amino | decarboxylase)) |
| | | | | acid decarboxylase)) | |
| 1430 | 1309 | M84648 | M | (Dopa decarboxylase, aromatic-L-amino-acid decarboxylase, | (dopa decarboxylase, dopa decarboxylase (aromatic L-amino acid |
| | | | | dopa decarboxylase, dopa decarboxylase (aromatic L-amino | decarboxylase)) |
| | | | | acid decarboxylase)) | |
| 1183 | 465 | AF013144 | N | (dual specificity phosphatase 5, similar to MAP-kinase | dual specificity phosphatase 5 |
| | | | | phosphatase (cpg21)) | |
| 20896 | 1475 | U64030 | A, F | (dUTP pyrophosphatase, deoxyuridine 5′-triphosphate | (dUTP pyrophosphatase, deoxyuridine triphosphatase) |
| | | | | nucleotidohydrolase, deoxyuridine triphosphatase) | |
| 15662 | 445 | AB010119 | N, G | (Dynein light chain 90F, t-complex testis expressed 1, t-complex- | (t-complex testis expressed 1, t-complex-associated-testis- |
| | | | | associated-testis-expressed 1-like 1) | expressed 1-like 1) |
| 15663 | 834 | AI175566 | M | (Dynein light chain 90F, t-complex testis expressed 1, t-complex- | (t-complex testis expressed 1, t-complex-associated-testis- |
| | | | | associated-testis-expressed 1-like 1) | expressed 1-like 1) |
| 9176 | 691 | AI072675 | A | (dystonia 1, dystonia 1, torsion (autosomal dominant; torsin A)) | (dystonia 1, dystonia 1, torsion (autosomal dominant; torsin A)) |
| 19712 | 1429 | U18374 | K | (Ecdysone receptor, nuclear receptor subfamily 1, group H, | nuclear receptor subfamily 1, group H, member 4 |
| | | | | member 4) | |
| 1214 | 1076 | D13871 | M, N, K | (Ecdysone receptor, nuclear receptor subfamily 1, group H, | (nuclear receptor subfamily 1, group H, member 4, solute carrier |
| | | | | member 4, solute carrier family 2 (facilitated glucose | family 2 (facilitated glucose transporter), member 5, solute carrier |
| | | | | transporter), member 5, solute carrier family 2 (facilitated | family 2 (facilitated glucose/fructose transporter), member 5) |
| | | | | glucose/fructose transporter), member 5) | |
| 7124 | 1409 | U07181 | E | (Ecdysone-inducible gene L3, lactate dehydrogenase 2, B chain, | (lactate dehydrogenase 2, B chain, lactate dehydrogenase B) |
| | | | | lactate dehydrogenase B, lactate dehydrogenase B4) | |
| 17563 | 875 | AI178750 | N | (Elongation factor 2b, Elongation factor Tu family (contains | eukaryotic translation elongation factor 2 |
| | | | | ATP/GTP binding P-loop), eukaryotic translation elongation | |
| | | | | factor 2) | |
| 20925 | 1412 | U08976 | N, L | (enoyl Coenzyme A hydratase 1, peroxisomal, enoyl coenzyme | (enoyl Coenzyme A hydratase 1, peroxisomal, enoyl coenzyme A |
| | | | | A hydratase 1, peroxisomal) | hydratase 1, peroxisomal) |
| 23194 | 227 | AA892417 | M | (ephrin A1, ephrin-A1) | (ephrin A1, ephrin-A1) |
| 17907 | 969 | AI233224 | M | (epidermal growth factor receptor, epidermal growth factor | (epidermal growth factor receptor, epidermal growth factor receptor |
| | | | | receptor (erythroblastic leukemia viral (v-erb-b) oncogene | (erythroblastic leukemia viral (v-erb-b) oncogene homolog, avian)) |
| | | | | homolog, avian)) | |
| 20885 | 1403 | U04842 | N, G, K | (epidermal growth factor, epidermal growth factor (beta- | (epidermal growth factor, epidermal growth factor (beta- |
| | | | | urogastrone)) | urogastrone)) |
| 20884 | 1513 | X12748 | N, G, K | (epidermal growth factor, epidermal growth factor (beta- | (epidermal growth factor, epidermal growth factor (beta- |
| | | | | urogastrone)) | urogastrone)) |
| 21509 | 98 | AA851618 | G | (epithelial membrane protein 3, wu: fa04d03) | epithelial membrane protein 3 |
| 17541 | 1247 | M26125 | M, N, A, B, H, I | (epoxide hydrolase, epoxide hydrolase 1, microsomal, epoxide | (epoxide hydrolase 1, microsomal, epoxide hydrolase 1, microsomal |
| | | | | hydrolase 1, microsomal (xenobiotic)) | xenobiotic)) |
| 8188 | 652 | AI058943 | M | (erythrocyte membrane protein band 4.1-like 3, erythrocyte | (erythrocyte membrane protein band 4.1-like 3, erythrocyte protein |
| | | | | protein band 4.1-like 3) | band 4.1-like 3) |
| 744 | 506 | AF076856 | M, N | (espin, forked) | espin |
| 4592 | 1135 | J02646 | H | (eukaryotic translation initiation factor 2, subunit 1 alpha, | (eukaryotic translation initiation factor 2, subunit 1 alpha, eukaryotic |
| | | | | eukaryotic translation initiation factor 2, subunit 1 alpha, 35 kDa) | translation initiation factor 2, subunit 1 alpha, 35 kDa) |
| 1764 | 1591 | X83399 | C | (eukaryotic translation initiation factor 4E, eukaryotic translation | (eukaryotic translation initiation factor 4E, similar to Eukaryotic |
| | | | | initiation factor elF4E-1, similar to Eukaryotic translation initiation | translation initiation factor 4E (elF-4E) (elF4E) (mRNA cap-binding |
| | | | | factor 4E (elF-4E) (elF4E) (mRNA cap-binding protein) (elF-4F | protein) (elF-4F 25 kDa subunit)) |
| | | | | 25 kDa subunit), translation initiation factor) | |
| 21147 | 1111 | D63772 | M, F, H, I, J, L | (Excitatory amino acid transporter 1, solute carrier family 1 | (solute carrier family 1 (neuronal/epithelial high affinity glutamate |
| | | | | (neuronal/epithelial high affinity glutamate transporter, system | transporter, system Xag), member 1, solute carrier family 1, member |
| | | | | Xag), member 1, solute carrier family 1, member 1) | 1) |
| 21145 | 1334 | NM_013032 | M, B | (Excitatory amino acid transporter 1, solute carrier family 1 | (solute carrier family 1 (neuronal/epithelial high affinity glutamate |
| | | | | (neuronal/epithelial high affinity glutamate transporter, system | transporter, system Xag), member 1, solute carrier family 1, member |
| | | | | Xag), member 1, solute carrier family 1, member 1) | 1) |
| 5920 | 788 | AI169163 | B | (expressed sequence AW261723, solute carrier family 17 | (expressed sequence AW261723, solute carrier family 17 (sodium |
| | | | | (sodium phosphate), member 3) | phosphate), member 3) |
| 16449 | 1327 | M95591 | N | (farnesyl diphosphate farnesyl transferase 1, farnesyl- | (farnesyl diphosphate farnesyl transferase 1, farnesyl-diphosphate |
| | | | | diphosphate farnesyltransferase 1) | farnesyltransferase 1) |
| 16450 | 1327 | M95591 | N | (farnesyl diphosphate farnesyl transferase 1, farnesyl- | (farnesyl diphosphate farnesyl transferase 1, farnesyl-diphosphate |
| | | | | diphosphate farnesyltransferase 1) | farnesyltransferase 1) |
| 15069 | 1319 | M89945 | H | (farnesyl diphosphate synthase (farnesyl pyrophosphate | (farnesyl diphosphate synthase (farnesyl pyrophosphate synthetase, |
| | | | | synthetase, dimethylallyltranstransferase, | dimethylallyltranstransferase, geranyltranstransferase), farnesyl |
| | | | | geranyltranstransferase), farnesyl diphosphate synthetase) | diphosphate synthetase) |
| 25460 | 1319 | M89945 | N | (farnesyl diphosphate synthase (farnesyl pyrophosphate | (farnesyl diphosphate synthase (farnesyl pyrophosphate synthetase, |
| | | | | synthetase, dimethylallyltranstransferase, | dimethylallyltranstransferase, geranyltranstransferase), farnesyl |
| | | | | geranyltranstransferase), farnesyl diphosphate synthetase) | diphosphate synthetase) |
| 16476 | 1141 | J02773 | M, L | (fatty acid binding protein 11, oocyte, fatty acid binding protein 3, | (fatty acid binding protein 3, muscle and heart, fatty acid binding |
| | | | | muscle and heart, fatty acid binding protein 3, muscle and heart | protein 3, muscle and heart (mammary-derived growth inhibitor)) |
| | | | | (mammary-derived growth inhibitor)) | |
| 20983 | 634 | AI044900 | K | (fatty acid Coenzyme A ligase, long chain 2, fatty-acid- | (fatty acid Coenzyme A ligase, long chain 2, fatty-acid-Coenzyme A |
| | | | | Coenzyme A ligase, long-chain 2) | ligase, long-chain 2) |
| 15926 | 451 | AB012933 | D | (fatty acid Coenzyme A ligase, long chain 5, fatty-acid- | (fatty acid Coenzyme A ligase, long chain 5, fatty-acid-Coenzyme A |
| | | | | Coenzyme A ligase, long-chain 5, wu: fa04h02) | ligase, long-chain 5) |
| 13004 | 1007 | AI236284 | J, L | (fatty acid-Coenzyme A ligase, long chain 4, fatty-acid- | (fatty acid-Coenzyme A ligase, long chain 4, fatty-acid-Coenzyme A |
| | | | | Coenzyme A ligase, long-chain 4, long-chain-fatty-acid coA | ligase, long-chain 4) |
| | | | | ligase) | |
| 13005 | 1116 | D85189 | N, C | (fatty acid-Coenzyme A ligase, long chain 4, fatty-acid- | (fatty acid-Coenzyme A ligase, long chain 4, fatty-acid-Coenzyme A |
| | | | | Coenzyme A ligase, long-chain 4, long-chain-fatty-acid coA | ligase, long-chain 4) |
| | | | | ligase) | |
| 20868 | 1256 | M32062 | N | (Fc fragment of IgG, low affinity IIa, receptor for (CD32), Fc | (Fc fragment of IgG, low affinityIIa, receptor for (CD32), Fc receptor, |
| | | | | receptor, IgG, low affinity III) | IgG, low affinity III) |
| 20869 | 1256 | M32062 | N | (Fc fragment of IgG, low affinity IIa, receptor for (CD32), Fc | (Fc fragment of IgG, low affinityIIa, receptor for (CD32), Fc receptor, |
| | | | | receptor, IgG, low affinity III) | IgG, low affinity III) |
| 1427 | 1209 | L38644 | N | (Female sterile (2) Ketel, karyopherin (importin) beta 1) | karyopherin (importin) beta 1 |
| 9452 | 373 | AA955206 | M | (fibrinogen-like 2, fibrinogen-like protein 2) | (fibrinogen-like 2, fibrinogen-like protein 2) |
| 15295 | 164 | AA875594 | M, H, I | (FK506 binding protein 1A, 12 kDa, FK506-binding protein 2) | FK506 binding protein 1A, 12 kDa |
| 6782 | 838 | AI176170 | B | (FK506 binding protein 1A, 12 kDa, FK506-binding protein 2) | FK506 binding protein 1A, 12 kDa |
| 15296 | 907 | AI228738 | N, H, I | (FK506 binding protein 1A, 12 kDa, FK506-binding protein 2) | FK506 binding protein 1A, 12 kDa |
| 15297 | 1118 | D86641 | N, K | (FK506 binding protein 1A, 12 kDa, FK506-binding protein 2) | FK506 binding protein 1A, 12 kDa |
| 13091 | 764 | AI136977 | L | (FK506 binding protein 4, FK506 binding protein 4, 59 kDa, | (FK506 binding protein 4, FK506 binding protein 4, 59 kDa) |
| | | | | FK506-binding protein FKBP59) | |
| 16895 | 1313 | M86240 | N | (fructose bisphosphatase 1, fructose-1,6-bisphosphatase 1) | (fructose bisphosphatase 1, fructose-1,6-bisphosphatase 1) |
| 7064 | 122 | M12919 | N | (Fructose-bisphosphate aldolase class-I, aldolase 1, A isoform, | (aldolase 1, A isoform, aldolase A, fructose-bisphosphate) |
| | | | | aldolase A, fructose-bisphosphate) | |
| 23961 | 1298 | M77694 | M, N, E, G, I | (Fumarylacetoacetase, fumarylacetoacetase, | (fumarylacetoacetate hydrolase, fumarylacetoacetate hydrolase |
| | | | | fumarylacetoacetate hydrolase, fumarylacetoacetate hydrolase | (fumarylacetoacetase)) |
| | | | | (fumarylacetoacetase)) | |
| 15887 | 154 | AA875225 | N | (G protein alphai subunit 65A, guanine nucleotide binding protein | (guanine nucleotide binding protein (G protein), alpha inhibiting |
| | | | | (G protein), alpha inhibiting activity polypeptide 2, guanine | activity polypeptide 2, guanine nucleotide binding protein, alpha |
| | | | | nucleotide binding protein, alpha inhibiting 2) | inhibiting 2) |
| 15888 | 154 | AA875225 | N | (G protein alphai subunit 65A, guanine nudeotide binding protein | (guanine nucleotide binding protein (G protein), alpha inhibiting |
| | | | | (G protein), alpha inhibiting activity polypeptide 2, guanine | activity polypeptide 2, guanine nucleotide binding protein, alpha |
| | | | | nucleotide binding protein, alpha inhibiting 2) | inhibiting 2) |
| 45 | 1417 | U10354 | M, J, L | (G protein-coupled receptor, family C, group 2, member A, | (G protein-coupled receptor, family C, group 2, member A, calcium- |
| | | | | calcium-sensing receptor (hypocalciuric hypercalcemia 1, severe | sensing receptor (hypocalciuric hypercalcemia 1, severe neonatal |
| | | | | neonatal hyperparathyroidism)) | hyperparathyroidism)) |
| 729 | 1328 | M95762 | N, D | (gamma-aminobutyric acid (GABA-A) transporter 3, solute carrier | (gamma-aminobutyric acid (GABA-A) transporter 3, solute carrier |
| | | | | family 6 (neurotransmitter transporter, GABA), member 13) | family 6 (neurotransmitter transporter, GABA), member 13) |
| 15072 | 1357 | NM_144730 | A | (GATA binding protein 4, GATA-binding protein 4) | GATA binding protein 4 |
| 16248 | 1376 | S68135 | N | (Glucose transporter 1, solute carrier family 2 (facilitated glucose | solute carrier family 2 (facilitated glucose transporter), member 1 |
| | | | | transporter), member 1, sugar transporter) | |
| 1321 | 1206 | L37333 | N | (glucose-6-phosphatase, catalytic, glucose-6-phosphatase, | (glucose-6-phosphatase, catalytic, glucose-6-phosphatase, catalytic |
| | | | | catalytic (glycogen storage disease type I, von Gierke disease)) | (glycogen storage disease type I, von Gierke disease)) |
| 5496 | 507 | AF080468 | M, N, D, E | (glucose-6-phosphatase, transport (glucose-6-phosphate) | (glucose-6-phosphatase, transport (glucose-6-phosphate) protein 1, |
| | | | | protein 1, glucose-6-phosphatase, transport protein 1) | glucose-6-phosphatase, transport protein 1) |
| 5497 | 507 | AF080468 | M, N, D, E | (glucose-6-phosphatase, transport (glucose-6-phosphate) | (glucose-6-phosphatase, transport (glucose-6-phosphate) protein 1, |
| | | | | protein 1, glucose-6-phosphatase, transport protein 1) | glucose-6-phosphatase, transport protein 1) |
| 4574 | 968 | AI233216 | N | (Glutamate dehydrogenase, glutamate dehydrogenase, | (glutamate dehydrogenase, glutamate dehydrogenase 1) |
| | | | | glutamate dehydrogenase 1) | |
| 14003 | 1374 | S65555 | N, B, J | (glutamate-cysteine ligase, modifier subunit, glutamate-cysteine | (glutamate-cysteine ligase, modifier subunit, glutamate-cysteine |
| | | | | ligase, modifier subunit) | ligase, modifier subunit) |
| 1247 | 1163 | J05181 | N, J | (Glutamate-cysteine ligase catalytic subunit, glutamate-cysteine | glutamate-cysteine ligase, catalytic subunit |
| | | | | ligase, glutamate-cysteine ligase, catalytic subunit) | |
| 1853 | 1511 | X12367 | N | (glutathione peroxidase 1, similar to glutathione peroxidase 1) | |
| 4615 | 1061 | D00680 | N | (glutathione peroxidase 3, glutathione peroxidase 3 (plasma)) | (glutathione peroxidase 3, glutathione peroxidase 3 (plasma)) |
| 18989 | 1168 | K00136 | N | (glutathione S-transferase A5, glutathione S-transferase, alpha 2 | (glutathione S-transferase A5, glutathione S-transferase, alpha 2 |
| | | | | (Yc2)) | (Yc2)) |
| 20817 | 582 | AI012589 | M, N | (glutathione S-transferase pi, glutathione S-transferase, pi 2) | (glutathione S-transferase pi, glutathione S-transferase, pi 2) |
| 20818 | 1498 | X02904 | M, N | (glutathione S-transferase pi, glutathione S-transferase, pi 2) | (glutathione S-transferase pi, glutathione S-transferase, pi 2) |
| 573 | 949 | AI232087 | N, J | (glycolate oxidase, hydroxyacid oxidase (glycolate oxidase) 3, | (hydroxyacid oxidase (glycolate oxidase) 3, hydroxyacid oxidase 2 |
| | | | | hydroxyacid oxidase 2 (long chain)) | (long chain)) |
| 22675 | 1493 | U92081 | N, G | (glycoprotein 38, lung type-I cell membrane-associated | (glycoprotein 38, lung type-I cell membrane-associated glycoprotein) |
| | | | | glycoprotein) | |
| 4254 | 1219 | M12450 | N | (group specific component, group-specific component (vitamin D | (group specific component, group-specific component (vitamin D |
| | | | | binding protein)) | binding protein)) |
| 352 | 661 | AI070295 | H | (growth arrest and DNA-damage-inducible 45 alpha, growth | (growth arrest and DNA-damage-inducible 45 alpha, growth arrest |
| | | | | arrest and DNA-damage-inducible, alpha) | and DNA-damage-inducible, alpha) |
| 353 | 1203 | L32591 | M, H, I | (growth arrest and DNA-damage-inducible 45 alpha, growth | (growth arrest and DNA-damage-inducible 45 alpha, growth arrest |
| | | | | arrest and DNA-damage-inducible, alpha) | and DNA-damage-inducible, alpha) |
| 354 | 1203 | L32591 | M, H, I | (growth arrest and DNA-damage-inducible 45 alpha, growth | (growth arrest and DNA-damage-inducible 45 alpha, growth arrest |
| | | | | arrest and DNA-damage-inducible, alpha) | and DNA-damage-inducible, alpha) |
| 25290 | 1102 | D42148 | N, J | (growth arrest specific 6, growth arrest-specific 6) | (growth arrest specific 6, growth arrest-specific 6) |
| 8888 | 81 | AA849036 | N, B | (Guanyl cyclase alpha-subunit at 99B, guanylate cyclase 1, | guanylate cyclase 1, soluble, alpha 3 |
| | | | | soluble, alpha 3) | |
| 1976 | 1326 | M95493 | N | (guanylate cyclase activator 1B (retina), guanylate cyclase | (guanylate cyclase activator 1B (retina), guanylate cyclase activator |
| | | | | activator 2 (guanylin 2, intestinal, heatstable), guanylate cyclase | 2 (guanylin 2, intestinal, heatstable), guanylate cyclase activator 2A |
| | | | | activator 2A (guanylin)) | (guanylin)) |
| 17661 | 1267 | M37584 | N, E | (H2A histone family, member Z, Histone H2A variant, histone | H2A histone family, member Z |
| | | | | H2A variant) | |
| 15642 | 861 | AI177503 | M, F, J | (H3 histone, family 3B, H3 histone, family 3B (H3.3B)) | (H3 histone, family 3B, H3 histone, family 3B (H3.3B)) |
| 20167 | 1523 | X15705 | E | (heat shock 70 kDa protein 2, heat shock protein 2) | (heat shock 70 kDa protein 2, heat shock protein 2) |
| 17764 | 985 | AI234604 | N | (heat shock 70 kDa protein 8, heat shock cognate 71-kd protein, | (heat shock 70 kDa protein 8, heat shock protein 8) |
| | | | | heat shock protein 1, heat shock protein 8) | |
| 17765 | 1216 | M11942 | N | (heat shock 70 kDa protein 8, heat shock cognate 71-kd protein, | (heat shock 70 kDa protein 8, heat shock protein 8) |
| | | | | heat shock protein 1, heat shock protein 8) | |
| 16518 | 845 | AI176546 | N, C, K | (heat shock 90 kDa protein 1, alpha, heat shock protein 1, alpha) | (heat shock 90 kDa protein 1, alpha, heat shock protein 1, alpha) |
| 20795 | 1360 | NM_175761 | N, H | (heat shock 90 kDa protein 1, alpha, heat shock protein 1, alpha) | (heat shock 90 kDa protein 1, alpha, heat shock protein 1, alpha) |
| 17301 | 1292 | M69246 | N, E, I | (heat shock protein 47, serine (or cysteine) proteinase inhibitor, | (serine (or cysteine) proteinase inhibitor, clade H (heat shock protein |
| | | | | clade H (heat shock protein 47), member 1, (collagen binding | 47), member 1, (collagen binding protein 1), serine (or cysteine) |
| | | | | protein 1), serine (or cysteine) proteinase inhibitor, clade H, | proteinase inhibitor, clade H, member 1) |
| | | | | member 1) | |
| 1466 | 1222 | M14050 | N | (Heat shock protein cognate 3, heat shock 70 kD protein 5 | (heat shock 70 kD protein 5 (glucose-regulated protein), heat shock |
| | | | | (glucose-regulated protein), heat shock 70 kDa protein 5 (glucose | 70 kDa protein 5 (glucose-regulated protein, 78 kDa)) |
| | | | | regulated protein, 78 kDa), heat shock protein) | |
| 605 | 1199 | L27340 | C | (hedgehog, sonic hedgehog, sonic hedgehog homolog | (sonic hedgehog, sonic hedgehog homolog (Drosophila)) |
| | | | | (Drosophila)) | |
| 1685 | 97 | AA851497 | J | (hemoglobin alpha, adult chain 1, hemoglobin alpha, adult chain | (hemoglobin alpha, adult chain 1, hemoglobin, alpha 1, hemoglobin, |
| | | | | 2, hemoglobin, alpha 1, hemoglobin, alpha 2) | alpha 2) |
| 1687 | 890 | AI179971 | J | (hemoglobin alpha, adult chain 1, hemoglobin alpha, adult chain | (hemoglobin alpha, adult chain 1, hemoglobin, alpha 1, hemoglobin, |
| | | | | 2, hemoglobin, alpha 1, hemoglobin, alpha 2) | alpha 2) |
| 1688 | 932 | AI230970 | J | (hemoglobin alpha, adult chain 1, hemoglobin alpha, adult chain | (hemoglobin alpha, adult chain 1, hemoglobin, alpha 1, hemoglobin, |
| | | | | 2, hemoglobin, alpha 1, hemoglobin, alpha 2) | alpha 2) |
| 1689 | 1009 | AI236360 | J | (hemoglobin alpha, adult chain 1, hemoglobin alpha, adult chain | (hemoglobin alpha, adult chain 1, hemoglobin, alpha 1, hemoglobin, |
| | | | | 2, hemoglobin, alpha 1, hemoglobin, alpha 2) | alpha 2) |
| 1684 | 1547 | X56325 | J | (hemoglobin alpha, adult chain 1, hemoglobin alpha, adult chain | (hemoglobin alpha, adult chain 1, hemoglobin, alpha 1, hemoglobin, |
| | | | | 2, hemoglobin, alpha 1, hemoglobin, alpha 2) | alpha 2) |
| 6055 | 1218 | M12337 | M, N, D | (Henna, phenylalanine hydroxylase, phenylalanine-4- | phenylalanine hydroxylase |
| | | | | hydroxylase (PH4H)) | |
| 10860 | 1549 | X57133 | N | (Hepatocyte nuclear factor 4, hepatic nuclear factor 4, | (hepatic nuclear factor 4, hepatocyte nuclear factor 4, alpha) |
| | | | | hepatocyte nuclear factor 4, alpha) | |
| 25699 | 1549 | X57133 | N | (Hepatocyte nuclear factor 4, hepatic nuclear factor 4, | (hepatic nuclear factor 4, hepatocyte nuclear factor 4, alpha) |
| | | | | hepatocyte nuclear factor 4, alpha) | |
| 17502 | 1217 | M12156 | N | (Heterogeneous nuclear ribonucleoprotein at 98DE, | heterogeneous nuclear ribonucleoprotein A1 |
| | | | | heterogeneous nuclear ribonucleoprotein A1) | |
| 25682 | 1530 | X16933 | N | (heterogeneous nuclear ribonucleoprotein D, heterogeneous | (heterogeneous nuclear ribonucleoprotein D, heterogeneous nuclear |
| | | | | nuclear ribonucleoprotein D (AU-rich element RNA binding | ribonucleoprotein D (AU-rich element RNA binding protein 1, |
| | | | | protein 1, 37 kDa)) | 37 kDa)) |
| 19834 | 1080 | D14048 | E | (heterogeneous nuclear ribonucleoprotein U, heterogeneous | (heterogeneous nuclear ribonucleoprotein U, heterogeneous nuclear |
| | | | | nuclear ribonucleoprotein U (scaffold attachment factor A)) | ribonucleoprotein U (scaffold attachment factor A)) |
| 19110 | 1289 | M64986 | A, J | (high-mobility group box 1, similar to Amphoterin) | high-mobility group box 1 |
| 24428 | 1074 | D13126 | N | (hippocalcin-like 1, similar to neural visinin-like Ca2+-binding | hippocalcin-like 1 |
| | | | | protein type 3) | |
| 17345 | 202 | AA892014 | E | (HLA-B associated transcript 1, HLA-B-associated transcript 1A) | (HLA-B associated transcript 1, HLA-B-associated transcript 1A) |
| 25279 | 1092 | D30740 | C | (hm: zehn0976, tyrosine 3-monooxygenase/tryptophan 5- | tyrosine 3-monooxygenase/tryptophan 5-monooxygenase activation |
| | | | | monooxygenase activation protein, zeta polypeptide) | protein, zeta polypeptide |
| 14929 | 802 | AI170353 | M, G, K | (hm: zehp0199, ribosomal protein L21) | ribosomal protein L21 |
| 20772 | 1470 | U60882 | N | (HMT1 hnRNP methyltransferase-like 2 (S. cerevisiae), | (HMT1 hnRNP methyltransferase-like 2 (S. cerevisiae), |
| | | | | heterogeneous nuclear ribonucleoproteins methyltransferase- | heterogeneous nuclear ribonucleoproteins methyltransferase-like 2 |
| | | | | like 2 (S. cerevisiae)) | (S. cerevisiae)) |
| 783 | 1011 | AI236589 | F | (hormone sensitive lipase, lipase, hormone sensitive, lipase, | (lipase, hormone sensitive, lipase, hormone-sensitive) |
| | | | | hormone-sensitive) | |
| 11840 | 1604 | Y15068 | H, I | (Hsp70/Hsp90 organizing protein homolog, stress-induced | (stress-induced phosphoprotein 1, stress-induced-phosphoprotein 1 |
| | | | | phosphoprotein 1, stress-induced-phosphoprotein 1 | (Hsp70/Hsp90-organizing protein)) |
| | | | | (Hsp70/Hsp90-organizing protein)) | |
| 23045 | 480 | AF034218 | N | (hyaluronidase 1, hyaluronoglucosaminidase 1) | (hyaluronidase 1, hyaluronoglucosaminidase 1) |
| 15175 | 355 | AA945583 | E | (hydroxyacyl-Coenzyme A dehydrogenase type II, hydroxyacyl- | (hydroxyacyl-Coenzyme A dehydrogenase type II, hydroxyacyl- |
| | | | | Coenzyme A dehydrogenase, type II, scully) | Coenzyme A dehydrogenase, type II) |
| 275 | 1434 | U22424 | M | (hydroxysteroid (11-beta) dehydrogenase 2, hydroxysteroid 11- | (hydroxysteroid (11-beta) dehydrogenase 2, hydroxysteroid 11-beta |
| | | | | beta dehydrogenase 2) | dehydrogenase 2) |
| 18612 | 904 | AI228624 | G | (hypothetical gene supported by AK036061, ribosomal protein | ribosomal protein L29 |
| | | | | L29) | |
| 16204 | 1505 | X06423 | M, N, G | (hypothetical gene supported by X73829; AK011058; AK012665; | ribosomal protein S8 |
| | | | | AK019223; AK088660; BC027217; NM_009098, mg: ab03d05, | |
| | | | | ribosomal protein S8 | |
| 16205 | 1505 | X06423 | N, F | (hypothetical gene supported by X73829; AK011058; AK012665; | ribosomal protein S8 |
| | | | | AK019223; AK088660; BC027217; NM_009098, mg: ab03d05, | |
| | | | | ribosomal protein S8) | |
| 4589 | 498 | AF062389 | M, N, D | (hypothetical protein LOC123876, hypothetical protein | (hypothetical protein LOC123876, hypothetical protein MGC37245) |
| | | | | MGC37245) | |
| 24459 | 1154 | J03886 | C | (hypothetical protein LOC228785, myosin light chain kinase 2, | (hypothetical protein LOC228785, myosin light chain kinase 2, |
| | | | | skeletal muscle) | skeletal muscle) |
| 15138 | 543 | AI009801 | C | (hypothetical protein LOC284889, macrophage migration | (hypothetical protein LOC284889, macrophage migration inhibitory |
| | | | | inhibitory factor) | factor) |
| 15137 | 1385 | S73424 | L | (hypothetical protein LOC284889, macrophage migration | (hypothetical protein LOC284889, macrophage migration inhibitory |
| | | | | inhibitory factor) | factor) |
| 1949 | 1431 | U19614 | A | (hypothetical protein MGC6357, lamina-associated polypeptide | (hypothetical protein MGC6357, lamina-associated polypeptide 1B) |
| | | | | 1B) | |
| 9952 | 170 | AA891422 | N | (hypoxia induced gene 1, similar to HSPC010) | |
| 17401 | 1196 | L25785 | M, B, G | (id: ibd5097, transforming growth factor beta 1 induced transcript | (transforming growth factor beta 1 induced transcript 4, transforming |
| | | | | 4, transforming growth factor beta-stimulated protein TSC-22) | growth factor beta-stimulated protein TSC-22) |
| 10248 | 1193 | L23148 | N | (inhibitor of DNA binding 1, inhibitor of DNA binding 1, dominant | (inhibitor of DNA binding 1, inhibitor of DNA binding 1, dominant |
| | | | | negative helix-loop-helix protein) | negative helix-loop-helix protein) |
| 10464 | 1165 | J05510 | M, I | (Inositol 1,4,5,-tris-phosphate receptor, inositol 1,4,5- | inositol 1,4,5-triphosphate receptor, type 1 |
| | | | | triphosphate receptor, inositol 1,4,5-triphosphate receptor, type | |
| | | | | 1, similar to inositol 1,4,5-triphosphate receptor 1; InsP3R type I; | |
| | | | | Purkinje cell protein 1; opisthotonus) | |
| 21053 | 1226 | M15481 | M | (insulin-like growth factor 1, insulin-like growth factor 1 | (insulin-like growth factor 1, insulin-like growth factor 1 |
| | | | | (somatomedin C)) | (somatomedin C)) |
| 2554 | 1063 | D00913 | M, N | (intercellular adhesion molecule, intercellular adhesion molecule | (intercellular adhesion molecule, intercellular adhesion molecule 1 |
| | | | | 1 (CD54), human rhinovirus receptor) | (CD54), human rhinovirus receptor) |
| 2555 | 1063 | D00913 | M, C, I | (intercellular adhesion molecule, intercellular adhesion molecule | (intercellular adhesion molecule, intercellular adhesion molecule 1 |
| | | | | 1 (CD54), human rhinovirus receptor) | (CD54), human rhinovirus receptor) |
| 21659 | 560 | AI010584 | D | (interferon induced transmembrane protein 2 (1-8D), similar to | interferon induced transmembrane protein 2 (1-8D) |
| | | | | interferon-inducible protein 16) | |
| 17516 | 847 | AI176621 | A, E, L | (Iron regulatory protein 1B, aconitase 1, aconitase 1, soluble) | (aconitase 1, aconitase 1, soluble) |
| 1729 | 1342 | NM_019147 | N, B | (jagged 1, jagged 1 (Alagille syndrome), jagged3) | (jagged 1, jagged 1 (Alagille syndrome)) |
| 5384 | 166 | AA891041 | I | (Jun-B oncogene, Jun-related antigen, jun B proto-oncogene) | (Jun-B oncogene, jun B proto-oncogene) |
| 20161 | 1543 | X54686 | M, C, I | (Jun-B oncogene, Jun-related antigen, jun B proto-oncogene) | (Jun-B oncogene, jun B proto-oncogene) |
| 16726 | 1352 | NM_031855 | M, N, E, G, H, I | (ketohexokinase, ketohexokinase (fructokinase)) | (ketohexokinase, ketohexokinase (fructokinase)) |
| 11421 | 55 | AA818199 | E | (KH domain containing, RNA binding, signal transduction | KH domain containing, RNA binding, signal transduction associated 1 |
| | | | | associated 1, wu: fc56c11) | |
| 794 | 1476 | U68168 | M, I | (kynureninase, kynureninase (L-kynurenine hydrolase)) | kynureninase (L-kynurenine hydrolase) |
| 17807 | 1270 | M54926 | M, G | (lactate dehydrogenase A, lactate dehydrogenase A4) | lactate dehydrogenase A |
| 4723 | 515 | AF093773 | N | (lactate dehydrogenase, malate dehydrogenase 1, NAD | (malate dehydrogenase 1, NAD (soluble), malate dehydrogenase, |
| | | | | (soluble), malate dehydrogenase, soluble) | soluble) |
| 20086 | 590 | AI013260 | M, H | (Lamin, lamin A, lamin A/C) | (lamin A, lamin A/C) |
| 20085 | 1572 | X66870 | C | (Lamin, lamin A, lamin A/C) | (lamin A, lamin A/C) |
| 16871 | 1428 | U18314 | N, E | (lamina-associated protein 2, thymopoietin) | thymopoietin |
| 22434 | 1333 | NM_012974 | F | (laminin, beta 1, laminin, beta 2 (laminin S), similar to laminin, | laminin, beta 2 (laminin S) |
| | | | | beta 2) | |
| 16444 | 502 | AF065438 | N | (lectin, galactoside-binding, soluble, 3 binding protein, | (lectin, galactoside-binding, soluble, 3 binding protein, peptidylprolyl |
| | | | | peptidylprolyl isomerase C-associated protein) | isomerase C-associated protein) |
| 14978 | 858 | AI177386 | F | (Leukocyte-antigen-related-like, protein tyrosine phosphatase, | protein tyrosine phosphatase, receptor type, S |
| | | | | receptor type, S, protein-tyrosine phosphatase with fibronectin | |
| | | | | type III-like domains (DPTP and LAR like)) | |
| 10260 | 1393 | S81497 | N | (lipase A, lysosomal acid, cholesterol esterase (Wolman | (lipase A, lysosomal acid, cholesterol esterase (Wolman disease), |
| | | | | disease), lysosomal acid lipase 1) | lysosomal acid lipase 1) |
| 25563 | 1393 | S81497 | N | (lipase A, lysosomal acid, cholesterol esterase (Wolman | (lipase A, lysosomal acid, cholesterol esterase (Wolman disease), |
| | | | | disease), lysosomal acid lipase 1) | lysosomal acid lipase 1) |
| 1809 | 372 | AA946503 | G, K | (lipocalin 2, lipocalin 2 (oncogene 24p3)) | (lipocalin 2, lipocalin 2 (oncogene 24p3)) |
| 20753 | 43 | AA801441 | M, N, C, I | (Lissencephaly-1, platelet-activating factor acetylhydrolase, | (platelet-activating factor acetylhydrolase, isoform 1b, beta1 subunit, |
| | | | | isoform 1b, beta1 subunit, platelet-activating factor | platelet-activating factor acetylhydrolase, isoform Ib, alpha subunit |
| | | | | acetylhydrolase, isoform Ib, alpha subunit 45 kDa) | 45 kDa) |
| 15110 | 182 | AA891764 | M, I | (low density lipid receptor-rlated protein, low density lipoprotein | (low density lipoprotein receptor-related protein 2, low density |
| | | | | receptor-related protein 2, low density lipoprotein-related protein | lipoprotein-related protein 2) |
| | | | | 2) | |
| 15111 | 1205 | L34049 | M, I | (low density lipid receptor-rlated protein, low density lipoprotein | (low density lipoprotein receptor-related protein 2, low density |
| | | | | receptor-related protein 2, low density lipoprotein-related protein | lipoprotein-related protein 2) |
| | | | | 2) | |
| 15112 | 1205 | L34049 | N, I | (low density lipid receptor-rlated protein, low density lipoprotein | (low density lipoprotein receptor-related protein 2, low density |
| | | | | receptor-related protein 2, low density lipoprotein-related protein | lipoprotein-related protein 2) |
| | | | | 2) | |
| 21653 | 1022 | AI237535 | M, C, K | (LPS-induced TN factor, lipopolysaccharide-induced TNF factor) | (LPS-induced TN factor, lipopolysaccharide-induced TNF factor) |
| 21654 | 1460 | U53184 | M, I, L | (LPS-induced TN factor, lipopolysaccharide-induced TNF factor) | (LPS-induced TN factor, lipopolysaccharide-induced TNF factor) |
| 12450 | 729 | AI103955 | C | (LRP16 protein, RIKEN cDNA D930010J01 gene) | (LRP16 protein, RIKEN cDNA D930010J01 gene) |
| 15242 | 459 | AB017912 | D | (MAD homolog 2 (Drosophila), MAD, mothers against | (MAD homolog 2 (Drosophila), MAD, mothers against |
| | | | | decapentaplegic homolog 2 (Drosophila)) | decapentaplegic homolog 2 (Drosophila)) |
| 15243 | 459 | AB017912 | N | (MAD homolog 2 (Drosophila), MAD, mothers against | (MAD homolog 2 (Drosophila), MAD, mothers against |
| | | | | decapentaplegic homolog 2 (Drosophila)) | decapentaplegic homolog 2 (Drosophila)) |
| 165 | 778 | AI145329 | F | (malate dehydrogenase 2, NAD (mitochondrial), malate | (malate dehydrogenase 2, NAD (mitochondrial), malate |
| | | | | dehydrogenase, mitochondrial) | dehydrogenase, mitochondrial) |
| 13563 | 979 | AI233773 | E | (MAWD binding protein, RIKEN cDNA 0610038K03 gene) | (MAWD binding protein, RIKEN cDNA 0610038K03 gene) |
| 18070 | 462 | AF003008 | M, N | (MAX interacting protein 1, Max interacting protein 1, max | (MAX interacting protein 1, Max interacting protein 1) |
| | | | | interacting protein) | |
| 16676 | 1033 | AI639082 | N, E | (MCM6 minichromosome maintenance deficient 6 (MIS5 | (MCM6 minichromosome maintenance deficient 6 (MIS5 homolog, |
| | | | | homolog, S. pombe) (S. cerevisiae), Minichromosome | S. pombe) (S. cerevisiae), minichromosome maintenance deficient 6 |
| | | | | maintenance 6, minichromosome maintenance deficient 6 (MIS5 | (MIS5 homolog, S. pombe) (S. cerevisiae)) |
| | | | | homolog, S. pombe) (S. cerevisiae)) | |
| 16674 | 1425 | U17565 | E | (MCM6 minichromosome maintenance deficient 6 (MIS5 | (MCM6 minichromosome maintenance deficient 6 (MIS5 homolog, |
| | | | | homolog, S. pombe) (S. cerevisiae), Minichromosome | S. pombe) (S. cerevisiae), minichromosome maintenance deficient 6 |
| | | | | maintenance 6, minichromosome maintenance deficient 6 (MIS5 | (MIS5 homolog, S. pombe) (S. cerevisiae)) |
| | | | | homolog, S. pombe) (S. cerevisiae)) | |
| 16675 | 1425 | U17565 | N, E | (MCM6 minichromosome maintenance deficient 6 (MIS5 | (MCM6 minichromosome maintenance deficient 6 (MIS5 homolog, |
| | | | | homolog, S. pombe) (S. cerevisiae), Minichromosome | S. pombe) (S. cerevisiae), minichromosome maintenance deficient 6 |
| | | | | maintenance 6, minichromosome maintenance deficient 6 (MIS5 | (MIS5 homolog, S. pombe) (S. cerevisiae)) |
| | | | | homolog, S. pombe) (S. cerevisiae)) | |
| 16849 | 292 | AA894298 | N | (membrane metallo endopeptidase, membrane metallo- | (membrane metallo endopeptidase, membrane metallo- |
| | | | | endopeptidase (neutral endopeptidase, enkephalinase, CALLA, | endopeptidase (neutral endopeptidase, enkephalinase, CALLA, |
| | | | | CD10), neprilysin) | CD10)) |
| 5837 | 1363 | S43408 | M, N, F | (meprin 1 alpha, meprin A, alpha (PABA peptide hydrolase)) | (meprin 1 alpha, meprin A, alpha (PABA peptide hydrolase)) |
| 5838 | 1363 | S43408 | M, F, G | (meprin 1 alpha, meprin A, alpha (PABA peptide hydrolase)) | (meprin 1 alpha, meprin A, alpha (PABA peptide hydrolase)) |
| 1409 | 589 | AI012802 | M, A, C, E, F | (Metallo-beta-lactamase superfamily, hydroxyacyl glutathione | hydroxyacyl glutathione hydrolase |
| | | | | hydrolase) | |
| 15190 | 705 | AI102562 | M, N | (metallothionein 1, metallothionein 1K) | (metallothionein 1, metallothionein 1K) |
| 15189 | 1215 | M11794 | N, B | (metallothionein 1, metallothionein 1K) | (metallothionein 1, metallothionein 1K) |
| 8984 | 1180 | L10652 | D | (methionine aminopeptidase 2, methionyl aminopeptidase 2, | (methionine aminopeptidase 2, methionyl aminopeptidase 2) |
| | | | | uninitiated) | |
| 1549 | 1166 | J05519 | G | (methylenetetrahydrofolate dehydrogenase (NADP+ dependent), | (methylenetetrahydrofolate dehydrogenase (NADP+ dependent), |
| | | | | methenyltetrahydrofolate cyclohydrolase, formyltetrahydrofolate | methenyltetrahydrofolate cyclohydrolase, formyltetrahydrofolate |
| | | | | synthase, methylenetetrahydrofolate dehydrogenase (NADP+ | synthase, methylenetetrahydrofolate dehydrogenase (NADP+ |
| | | | | dependent), methenyltetrahydrofolate cyclohydrolase, | dependent), methenyltetrahydrofolate cyclohydrolase, |
| | | | | formyltetrahydrofolate synthetase, tetrahydrofolate synthase) | formyltetrahydrofolate synthetase) |
| 23606 | 1406 | U05784 | N | (microtubule-associated protein 1 light chain 3, microtubule- | (microtubule-associated protein 1 light chain 3, microtubule- |
| | | | | associated protein 1 light chain 3 beta) | associated protein 1 light chain 3 beta) |
| 23300 | 1488 | U84727 | N | (mitochrondrial 2-oxoglutarate/malate carrier protein, solute | solute carrier family 25 (mitochondrial carrier; oxoglutarate carrier), |
| | | | | carrier family 25 (mitochondrial carrier; oxoglutarate carrier), | member 11 |
| | | | | member 11, wu: fa07h09) | |
| 1453 | 1456 | U48596 | F, K | (mitogen-activated protein kinase kinase kinase 1, similar to | mitogen-activated protein kinase kinase kinase 1 |
| | | | | Mitogen-activated protein kinase kinase kinase 1 (MAPK/ERK | |
| | | | | kinase kinase 1) (MEK kinase 1) (MEKK 1)) | |
| 1454 | 1456 | U48596 | M, K | (mitogen-activated protein kinase kinase kinase 1, similar to | mitogen-activated protein kinase kinase kinase 1 |
| | | | | Mitogen-activated protein kinase kinase kinase 1 (MAPK/ERK | |
| | | | | kinase kinase 1) (MEK kinase 1) (MEKK 1)) | |
| 17324 | 495 | AF056031 | M | (Monooxygenase, cinnabar, kynurenine 3-monooxygenase | kynurenine 3-monooxygenase (kynurenine 3-hydroxylase) |
| | | | | (kynurenine 3-hydroxylase)) | |
| 11454 | 1245 | M24604 | M | (mutagen-sensitive 209, proliferating cell nuclear antigen) | proliferating cell nuclear antigen |
| 11455 | 1245 | M24604 | M | (mutagen-sensitive 209, proliferating cell nuclear antigen) | proliferating cell nuclear antigen |
| 24437 | 1239 | M22357 | A | (myelin associated glycoprotein, myelin-associated glycoprotein) | (myelin associated glycoprotein, myelin-associated glycoprotein) |
| 11483 | 470 | AF020618 | M, I | (myeloid differentiation primary response gene 116, protein | (myeloid differentiation primary response gene 116, protein |
| | | | | phosphatase 1, regulatory (inhibitor) subunit 15A) | phosphatase 1, regulatory (inhibitor) subunit 15A) |
| 18043 | 470 | AF020618 | F | (myeloid differentiation primary response gene 116, protein | (myeloid differentiation primary response gene 116, protein |
| | | | | phosphatase 1, regulatory (inhibitor) subunit 15A) | phosphatase 1, regulatory (inhibitor) subunit 15A) |
| 1970 | 1446 | U31463 | N, K | (myosin heavy chain IX, myosin, heavy polypeptide 9, non- | (myosin heavy chain IX, myosin, heavy polypeptide 9, non-muscle) |
| | | | | muscle, zipper) | |
| 20483 | 1524 | X15939 | N | (Myosin heavy chain, myosin, heavy polypeptide 7, cardiac | myosin, heavy polypeptide 7, cardiac muscle, beta |
| | | | | muscle, beta) | |
| 1104 | 497 | AF058714 | N | (Na+/sulphate co-transporter like, solute carrier family 13 | solute carrier family 13 (sodium-dependent dicarboxylate |
| | | | | (sodium-dependent dicarboxylate transporter), member 2) | transporter), member 2 |
| 25707 | 1558 | X59677 | N | (Na+/sulphate co-transporter like, solute carrier family 13 | solute carrier family 13 (sodium-dependent dicarboxylate |
| | | | | sodium-dependent dicarboxylate transporter), member 2) | transporter) member 2 |
| 21211 | 433 | AB000098 | C | (NADH dehydrogenase (ubiquinone) flavoprotein 3, 10 kDa, | (NADH dehydrogenase (ubiquinone) flavoprotein 3, 10 kDa, RIKEN |
| | | | | RIKEN cDNA 1500032D16 gene) | cDNA 1500032D16 gene) |
| 14638 | 765 | AI137049 | J | (Nijmegen breakage syndrome 1 (nibrin), nibrin) | (Nijmegen breakage syndrome 1 (nibrin), nibrin) |
| 570 | 1590 | X82445 | N | (nuclear distribution gene C homolog (A. nidulans), nuclear | (nuclear distribution gene C homolog (A. nidulans), nuclear |
| | | | | distribution gene C homolog (Aspergillus)) | distribution gene C homolog (Aspergillus)) |
| 1597 | 468 | AF014503 | L | (nuclear protein 1, p8 protein (candidate of metastasis 1)) | (nuclear protein 1, p8 protein (candidate of metastasis 1)) |
| 20035 | 422 | AA997933 | M, H | (nucleolar protein 5, nucleolar protein NOP5/NOP58) | (nucleolar protein 5, nucleolar protein NOP5/NOP58) |
| 25198 | 504 | AF069782 | M, N, I, K | (nucleolar protein 5, nucleolar protein NOP5/NOP58) | (nucleolar protein 5, nucleolar protein NOP5/NOP58) |
| 8829 | 1271 | M55015 | M, A, F, K | (nucleolin, wu: fa12d03) | nucleolin |
| 17394 | 1156 | J03969 | M, N, L | (nucleophosmin (nucleolar phosphoprotein B23, numatrin), | (nucleophosmin (nucleolar phosphoprotein B23, numatrin), |
| | | | | nucleophosmin 1) | nucleophosmin 1) |
| 17393 | 1159 | J04943 | M, N, | (nucleophosmin (nucleolar phosphoprotein B23, numatrin), | (nucleophosmin (nucleolar phosphoprotein B23, numatrin), |
| | | | | nucleophosmin 1) | nucleophosmin 1) |
| 1401 | 1494 | U93692 | J | (nucleoporin, nucleoporin 88 kDa) | (nucleoporin, nucleoporin 88 kDa) |
| 22927 | 127 | AA859920 | N, E | (Nucleosome assembly protein 1, nucleosome assembly protein | nucleosome assembly protein 1-like 1 |
| | | | | 1-like 1) | |
| 16006 | 499 | AF062594 | M | (Nucleosome assembly protein 1, nucleosome assembly protein | nucleosome assembly protein 1-like 1 |
| | | | | 1-like 1) | |
| 16007 | 499 | AF062594 | N, E | (Nucleosome assembly protein 1, nucleosome assembly protein | nucleosome assembly protein 1-like 1 |
| | | | | 1-like 1) | |
| 7665 | 622 | AI030668 | E | (Nucleosome assembly protein 1, nucleosome assembly protein | nucleosome assembly protein 1-like 1 |
| | | | | 1-like 1) | |
| 4242 | 276 | AA893325 | N | (ornithine aminotransferase, ornithine aminotransferase (gyrate | (ornithine aminotransferase, ornithine aminotransferase (gyrate |
| | | | | atrophy, ornithine aminotransferse precursor) | atrophy)) |
| 25467 | 1321 | M93297 | N, G | (ornithine aminotransferase, ornithine aminotransferase (gyrate | (ornithine aminotransferase, ornithine aminotransferase (gyrate |
| | | | | atrophy), ornithine aminotransferse precursor) | atrophy)) |
| 23523 | 1509 | X07944 | N | (Ornithine decarboxylase 1, ornithine decarboxylase, ornithine | ornithine decarboxylase 1 |
| | | | | decarboxylase 1, similar to Ornithine decarboxylase (ODC)) | |
| 25589 | 1432 | U21718 | F | (PAI-1 mRNA-binding protein, similar to PAI-1 mRNA-binding | (PAI-1 mRNA-binding protein, similar to PAI-1 mRNA-binding |
| | | | | protein; chromodomain helicase DNA binding protein 3 | protein; chromodomain helicase DNA binding protein 3 interacting |
| | | | | interacting protein) | protein) |
| 4392 | 906 | AI228674 | H | (Peptidyl-prolyl cis-trans isomerases, peptidylprolyl isomerase A, | (peptidylprolyl isomerase A, peptidylprolyl isomerase A (cyclophilin |
| | | | | peptidylprolyl isomerase A (cyclophilin A)) | A)) |
| 19252 | 204 | AA892041 | H | (Peroxiredoxin 6005, peroxiredoxin 6) | peroxiredoxin 6 |
| 19254 | 467 | AF014009 | H | (Peroxiredoxin 6005, peroxiredoxin 6) | peroxiredoxin 6 |
| 4290 | 1058 | AJ224120 | L | (peroxisomal biogenesis factor 11A, peroxisomal biogenesis | (peroxisomal biogenesis factor 11A, peroxisomal biogenesis factor |
| | | | | factor 11a) | 11a) |
| 405 | 1575 | X70223 | M, H, K | (peroxisomal membrane protein 2, peroxisomal membrane | (peroxisomal membrane protein 2, peroxisomal membrane protein |
| | | | | protein 2, 22 kDa) | 2, 22 kDa) |
| 21029 | 24 | AA799981 | C | (Phorbol esters/diacylglycerol binding domain (2 domains), | protein kinase C, eta |
| | | | | Protein kinase C terminal domain, Protein C kinase 98E, protein | |
| | | | | kinase C, eta) | |
| 23538 | 708 | AI102727 | M | (phosphate permease, solute carrier family 20 (phosphate | (solute carrier family 20 (phosphate transporter), member 1, solute |
| | | | | transporter), member 1, solute carrier family 20, member 1, | carrier family 20, member 1) |
| | | | | wu: fa05g12) | |
| 1340 | 1437 | U25651 | B | (Phosphofructokinase, phosphofructokinase, muscle) | phosphofructokinase, muscle |
| 1312 | 1255 | M31788 | J | (Phosphoglycerate kinase, phosphoglycerate kinase, | phosphoglycerate kinase 1 |
| | | | | phosphoglycerate kinase 1, similar to phosphoglycerate kinase | |
| | | | | 1) | |
| 16147 | 1459 | U51898 | M, N | (phospholipase A2, group VI, phospholipase A2, group VI | (phospholipase A2, group VI, phospholipase A2, group VI (cytosolic, |
| | | | | (cytosolic, calcium-independent)) | calcium-independent)) |
| 20414 | 1188 | L14323 | M | (phospholipase C, beta 1, phospholipase C, beta 1 | (phospholipase C, beta 1, phospholipase C, beta 1 |
| | | | | (phosphoinositide-specific)) | (phosphoinositide-specific)) |
| 1535 | 437 | AB000778 | F | (phospholipase D1, phospholipase D1, phophatidylcholine- | (phospholipase D1, phospholipase D1, phophatidylcholine-specific) |
| | | | | specific) | |
| 13369 | 1087 | D21132 | D | (phosphotidylinositol transfer protein, beta, vibrator) | phosphotidylinositol transfer protein, beta |
| 1141 | 1557 | X59601 | M, C, G | (plectin 1, intermediate filament binding protein 500 kDa, short | plectin 1, intermediate filament binding protein 500 kDa |
| | | | | stop) | |
| 6577 | 1506 | X06942 | F | (pole hole, raf-related oncogene, v-raf murine sarcoma 3611 viral | (raf-related oncogene, v-raf murine sarcoma 3611 viral oncogene |
| | | | | oncogene homolog 1) | homolog 1) |
| 1798 | 354 | AA945569 | M, D | (pregnancy zone protein, similar to alpha-2-macroglobulin) | |
| 20481 | 1240 | M22631 | M, N, G, K | (propionyl Coenzyme A carboxylase, alpha polypeptide, | (propionyl Coenzyme A carboxylase, alpha polypeptide, propionyl- |
| | | | | propionyl-Coenzyme A carboxylase, alpha polypeptide) | Coenzyme A carboxylase, alpha polypeptide) |
| 15599 | 1580 | X75253 | J | (prostatic binding protein, similar to hippocampal cholinergic | prostatic binding protein |
| | | | | neurostimulating peptide precursor protein) | |
| 18751 | 93 | AA851169 | G | (proteasome (prosome, macropain) 28 subunit, beta, | (proteasome (prosome, macropain) 28 subunit, beta, proteasome |
| | | | | proteasome (prosome, macropain) activator subunit 2 (PA28 | (prosome, macropain) activator subunit 2 (PA28 beta)) |
| | | | | beta), proteasome activator subunit 2) | |
| 18750 | 1105 | D45250 | N, G | (proteasome (prosome, macropain) 28 subunit, beta, | (proteasome (prosome, macropain) 28 subunit, beta proteasome |
| | | | | proteasome (prosome, macropain) activator subunit 2 (PA28 | (prosome, macropain) activator subunit 2 (PA28 beta)) |
| | | | | beta), proteasome activator subunit 2) | |
| 3987 | 1122 | D90258 | M, N | (proteasome (prosome, macropain) subunit, alpha type 3, | (proteasome (prosome, macropain) subunit, alpha type 3, |
| | | | | proteasome (prosome, macropain) subunit, alpha type, 3) | proteasome (prosome, macropain) subunit, alpha type, 3) |
| 15538 | 758 | AI112633 | L | (proteasome (prosome, macropain) subunit, alpha type 6, | (proteasome (prosome, macropain) subunit, alpha type 6, |
| | | | | (proteasome (prosome, macropain) subunit alpha type, 6, | proteasome (prosome, macropain) subunit, alpha type, 6) |
| | | | | proteasome (prosome, macropain) subunit, alpha type, 6a) | |
| 15535 | 1069 | D10755 | L | (proteasome (prosome, macropain) subunit, alpha type 6, | (proteasome (prosome, macropain) subunit, alpha type 6, |
| | | | | proteasome (prosome, macropain) subunit, alpha type 6, | proteasome (prosome, macropain) subunit, alpha type, 6) |
| | | | | proteasome (prosome, macropain) subunit, alpha type, 6a) | |
| 25253 | 1068 | D10754 | H | (proteasome (prosome, macropain) subunit beta type 6, | (proteasome (prosome, macropain) subunit, beta type 6, |
| | | | | proteasome (prosome, macropain) subunit, beta type, 6) | proteasome (prosome, macropain) subunit, beta type, 6) |
| 1447 | 1545 | X55986 | D | (Proteasome 29 kD subunit, endopeptidase, proteasome | (proteasome (prosome, macropain) subunit, alpha type 4, |
| | | | | (prosome, macropain) subunit, alpha type 4, proteasome | proteasome (prosome, macropain) subunit, alpha type, 4) |
| | | | | (prosome, macropain) subunit, alpha type, 4) | |
| 3254 | 1070 | D10756 | N, L | (Proteasome alpha subunit, proteasome (prosome, macropain) | (proteasome (prosome, macropain) subunit, alpha type 5, |
| | | | | subunit, alpha type 5, proteasome (prosome, macropain) | proteasome (prosome, macropain) subunit, alpha type, 5) |
| | | | | subunit, alpha type, 5) | |
| 556 | 1569 | X64336 | M, N | (protein C, protein C (inactivator of coagulation factors Va and | (protein C, protein C (inactivator of coagulation factors Va and |
| | | | | VIIIa)) | VIIIa)) |
| 25405 | 1230 | M18330 | N | (protein kinase, protein kinase C, delta) | protein kinase C, delta |
| 3202 | 1527 | X16043 | N | (protein phosphatase 2 (formerly 2A), catalytic subunit, alpha | (protein phosphatase 2 (formerly 2A), catalytic subunit, alpha |
| | | | | isoform, protein phosphatase 2a, catalytic subunit, alpha isoform) | isoform, protein phosphatase 2a, catalytic subunit, alpha isoform) |
| 245 | 1107 | D45412 | J | (Protein tyrosine phosphatase 10D, protein tyrosine | protein tyrosine phosphatase, receptor type, O |
| | | | | phosphatase, receptor type, O) | |
| 247 | 1443 | U28938 | J | (Protein tyrosine phosphatase 10D, protein tyrosine | protein tyrosine phosphatase, receptor type, O |
| | | | | phosphatase, receptor type, O) | |
| 24219 | 1200 | L27843 | M, L | (protein tyrosine phosphatase 4a1, protein tyrosine phosphatase | (protein tyrosine phosphatase 4a1, protein tyrosine phosphatase |
| | | | | type IVA, member 1, protein-tyrosine phosphotase) | type IVA, member 1) |
| 1844 | 1261 | M33962 | J | (Protein tyrosine phosphatase 61F, hypothetical gene supported | protein tyrosine phosphatase, non-receptor type 1 |
| | | | | by AK085713, protein tyrosine phosphatase 1b, protein tyrosine | |
| | | | | phosphatase, non-receptor type 1) | |
| 15761 | 500 | AF062741 | B | (putative pyruvate dehydrogenase phosphatase isoenzyme 2, | pyruvate dehydrogenase phosphatase isoenzyme 2 |
| | | | | pyruvate dehydrogenase phosphatase isoenzyme 2, similar to | |
| | | | | [Pyruvate dehydrogenase [Lipoamide]]-phosphatase 2, | |
| | | | | mitochondrial precursor (PDP 2) (Pyruvate dehydrogenase | |
| | | | | phosphatase, catalytic subunit 2) (PDPC 2)) | |
| 24235 | 169 | AA891286 | M, N, H, I | (pyridine nucleotide-disulphide oxidoreductase, thioredoxin | thioredoxin reductase 1 |
| | | | | reductase 1) | |
| 24234 | 1474 | U63923 | M, A, I | (pyridine nucleotide-disulphide oxidoreductase, thioredoxin | thioredoxin reductase 1 |
| | | | | reductase 1) | |
| 1928 | 1418 | U10357 | N | (Pyruvate dehydrogenase kinase, pyruvate dehydrogenase | pyruvate dehydrogenase kinase, isoenzyme 2 |
| | | | | kinase, isoenzyme 2) | |
| 1929 | 1418 | U10357 | N, A, C, D, E | (Pyruvate dehydrogenase kinase, pyruvate dehydrogenase | pyruvate dehydrogenase kinase, isoenzyme 2 |
| | | | | kinase, isoenzyme 2) | |
| 20513 | 1503 | X05684 | N | (Pyruvate kinase, pyruvate kinase liver and red blood cell, | (pyruvate kinase liver and red blood cell, pyruvate kinase, liver and |
| | | | | pyruvate kinase, liver and RBC) | RBC) |
| 240 | 1297 | M75153 | N | (RAB11A, member RAS oncogene family, RAB11a, member | (RAB11A, member RAS oncogene family, RAB11a, member RAS |
| | | | | RAS oncogene family) | oncogene family) |
| 24651 | 1306 | M83678 | N | (RAB13, member RAS oncogene family, hm: zeh0455) | RAB13, member RAS oncogene family |
| 20831 | 1307 | M83680 | B | (RAB14, member RAS oncogene family, RAS-related protein, | RAB14, member RAS oncogene family |
| | | | | Rab-protein 14) | |
| 9541 | 300 | AA900505 | N, L | (ras homolog gene family, member AB, ras homolog gene family, | (ras homolog gene family, member AB, ras homolog gene family, |
| | | | | member B) | member B) |
| 28 | 1093 | D31662 | M, F, G, I, J, L | (regucalcin, regucalcin (senescence marker protein-30)) | (regucalcin, regucalcin (senescence marker protein-30)) |
| 15790 | 478 | AF032120 | E | (regulator of G-protein signaling 19 interacting protein 1, | (regulator of G-protein signaling 19 interacting protein 1, regulator of |
| | | | | regulator of G-protein signalling 19 interacting protein 1) | G-protein signalling 19 interacting protein 1) |
| 15791 | 512 | AF089817 | C | (regulator of G-protein signaling 19 interacting protein 1, | (regulator of G-protein signaling 19 interacting protein 1, regulator of |
| | | | | regulator of G-protein signalling 19 interacting protein 1) | G-protein signalling 19 interacting protein 1) |
| 23806 | 1233 | M19257 | D | (retinol binding protein 1, cellular, similar to retinol binding protein | retinol binding protein 1, cellular |
| | | | | 1, cellular) | |
| 18108 | 1566 | X62528 | N | (ribonuclease/angiogenin inhibitor, ribonuclease/angiogenin | (ribonuclease/angiogenin inhibitor, ribonuclease/angiogenin inhibitor |
| | | | | inhibitor 1) | 1) |
| 24582 | 1528 | X16554 | D | (Ribose-phosphate pyrophosphokinase, phosphoribosyl | phosphoribosyl pyrophosphate synthetase 1 |
| | | | | pyrophosphate synthetase 1) | |
| 20812 | 356 | AA945611 | N | ribosomal protein 10, ribosomal protein L10) | (ribosomal protein 10, ribosomal protein L10) |
| 11849 | 1593 | X93352 | M, N, G | (ribosomal protein L10A, ribosomal protein L10a) | (ribosomal protein L10A, ribosomal protein L10a) |
| 19112 | 1036 | AI639157 | J | (Ribosomal protein L13, ribosomal protein L13) | ribosomal protein L13 |
| 23854 | 1585 | X78327 | N, G | (Ribosomal protein L13, ribosomal protein L13) | ribosomal protein L13 |
| 19268 | 530 | AI008641 | D | (Ribosomal protein L22, ribosomal protein L22) | ribosomal protein L22 |
| 4259 | 207 | AA892123 | N | (Ribosomal protein L36, ribosomal protein L36) | ribosomal protein L36 |
| 15875 | 1563 | X62145 | N | (Ribosomal protein L8, ribosomal protein L8) | |
| 25718 | 1563 | X62145 | M, G | (Ribosomal protein L8, ribosomal protein L8) | |
| 1069 | 1522 | X15096 | N | (Ribosomal protein P0, deoxyribonuclease, ribosomal protein, | similar to BLOCK 23 |
| | | | | large, P0, similar to 60S acidic ribosomal protein P0 (L10E), | |
| | | | | similar to BLOCK 23) | |
| 24615 | 1318 | M89646 | N, D | (ribosomal protein S24, similar to ribosomal protein S24) | ribosomal protein S24 |
| 20839 | 177 | AA891729 | N | (Ribosomal protein S27A, ribosomal protein S27a) | ribosomal protein S27a |
| 25686 | 1532 | X51536 | N, F | (Ribosomal protein S3, ribosomal protein S3) | |
| 10109 | 1555 | X58465 | N, G | Ribosomal protein S5, ribosomal protein S5) | |
| 25702 | 1555 | X58465 | N, G | Ribosomal protein S5, ribosomal protein S5) | |
| 18001 | 100 | AA858573 | M | (RIKEN cDNA 0610038O04 gene, secreted phosphoprotein 2, | (RIKEN cDNA 0610038O04 gene, secreted phosphoprotein 2, |
| | | | | 24 kDa) | 24 kDa) |
| 17999 | 1430 | U19485 | M | (RIKEN cDNA 0610038O04 gene, secreted phosphoprotein 2, | (RIKEN cDNA 0610038O04 gene, secreted phosphoprotein 2, |
| | | | | 24 kDa) | 24 kDa) |
| 18000 | 1430 | U19485 | I | (RIKEN cDNA 0610038O04 gene, secreted phosphoprotein 2, | (RIKEN cDNA 0610038O04 gene, secreted phosphoprotein 2, |
| | | | | 24 kDa) | 24 kDa) |
| 15277 | 989 | AI234889 | D | (RIKEN cDNA 1100001F19 gene, effete, ubiquitin-conjugating | (RIKEN cDNA 1100001F19 gene, ubiquitin-conjugating enzyme E2D |
| | | | | enzyme E2D 3 (UBC4/5 homolog, yeast)) | 3 (UBC4/5 homolog, yeast)) |
| 15273 | 1421 | U13177 | E | (RIKEN cDNA 1100001F19 gene, effete, ubiquitin-conjugating | (RIKEN cDNA 1100001F19 gene, ubiquitin-conjugating enzyme E2D |
| | | | | enzyme E2D 3 (UBC4/5 homolog, yeast)) | 3 (UBC4/5 homolog, yeast)) |
| 17758 | 1173 | K03249 | N | (RIKEN cDNA 1300002P22 gene, enoyl-Coenzyme A, | (RIKEN cDNA 1300002P22 gene, enoyl-Coenzyme A, hydratase/3- |
| | | | | hydratase/3-hydroxyacyl Coenzyme A dehydrogenase) | hydroxyacyl Coenzyme A dehydrogenase) |
| 20849 | 1502 | X05566 | M, G, K | (RIKEN cDNA 1500001M02 gene, death-associated protein 6, | (RIKEN cDNA 1500001M02 gene, death-associated protein 6, |
| | | | | myosin regulatory light chain 2, myosin regulatory light chain | myosin regulatory light chain MRCL3) |
| | | | | MRCL3, spaghetti squash) | |
| 8820 | 659 | AI070152 | B, H, L | (RIKEN cDNA 1700037B15 gene, similar to Smhs1 protein) | (RIKEN cDNA 1700037B15 gene, similar to Smhs1 protein) |
| 1867 | 91 | AA850940 | N | (RIKEN cDNA 2010004J23 gene, Ribosomal protein L1, | (RIKEN cDNA 2010004J23 gene, ribosomal protein L4) |
| | | | | ribosomal protein L1, ribosomal protein L4) | |
| 16847 | 1516 | X13549 | N | (RIKEN cDNA 2210402A09 gene, ribosomal protein S10) | (RIKEN cDNA 2210402A09 gene, ribosomal protein S10) |
| 25606 | 1461 | U53214 | C | (RIKEN cDNA 2410003M22 gene, tubulin-tyrosine ligase) | (RIKEN cDNA 2410003M22 gene, tubulin-tyrosine ligase) |
| 10667 | 1010 | AI236366 | C | (RIKEN cDNA 2410104I19 gene, RNA-binding protein, fuse- | (RIKEN cDNA 2410104I19 gene, fuse-binding protein-interacting |
| | | | | binding protein-interacting repressor, poly U binding factor 68 kD) | repressor) |
| 2367 | 516 | AF095741 | N | (RIKEN cDNA 2810484M10 gene, hypothetical protein | (RIKEN cDNA 2810484M10 gene, hypothetical protein FLJ22390) |
| | | | | FLJ22390) | |
| 2368 | 516 | AF095741 | N, K | (RIKEN cDNA 2810484M10 gene, hypothetical protein | (RIKEN cDNA 2810484M10 gene, hypothetical protein FLJ22390) |
| | | | | FLJ22390) | |
| 16929 | 1571 | X66370 | G | (RIKEN cDNA 3010033P07 gene, Ribosomal protein S9, | (RIKEN cDNA 3010033P07 gene, ribosomal protein S9) |
| | | | | ribosomal protein S9) | |
| 6290 | 790 | AI169232 | C | (RIKEN cDNA 3110039L19 gene, likely homolog of rat kinase D- | (RIKEN cDNA 3110039L19 gene, likely homolog of rat kinase D- |
| | | | | interacting substance of 220 kDa) | interacting substance of 220 kDa) |
| 23166 | 129 | AA859954 | M, C, L | (RIKEN cDNA 4930579A11 gene, likely ortholog of rat vacuole | (RIKEN cDNA 4930579A11 gene, likely ortholog of rat vacuole |
| | | | | membrane protein 1) | membrane protein 1) |
| 634 | 1170 | K01932 | N | (RIKEN cDNA 5730496E24 gene, glutathione S-transferase A3) | (RIKEN cDNA 5730496E24 gene, glutathione S-transferase A3) |
| 25525 | 1383 | S72505 | N | (RIKEN cDNA 5730496E24 gene, glutathione S-transferase A3) | (RIKEN cDNA 5730496E24 gene, glutathione S-transferase A3) |
| 635 | 1586 | X78848 | N | (RIKEN cDNA 5730496E24 gene, glutathione S-transferase A3) | (RIKEN cDNA 5730496E24 gene, glutathione S-transferase A3) |
| 24496 | 1312 | M85300 | M, N, I, K | (RIKEN cDNA 9030624O13 gene, solute carrier family 9 | (RIKEN cDNA 9030624O13 gene, solute carrier family 9 |
| | | | | (sodium/hydrogen exchanger), isoform 3, solute carrier family 9 | (sodium/hydrogen exchanger), isoform 3, solute carrier family 9 |
| | | | | (sodium/hydrogen exchanger), member 3) | (sodium/hydrogen exchanger), member 3) |
| 15703 | 444 | AB009372 | N | (RIKEN cDNA A530050D06 gene, chromosome 14 open reading | (RIKEN cDNA A530050D06 gene, chromosome 14 open reading |
| | | | | frame 76) | frame 76) |
| 15986 | 1602 | Y09945 | M, I | (RIKEN cDNA D630043A20 gene, solute carrier family 22 | (RIKEN cDNA D630043A20 gene, solute carrier family 22 (organic |
| | | | | (organic anion/cation transporter), member 9) | anion/cation transporter), member 9) |
| 19002 | 1043 | AI639465 | N | (ring finger protein 28, ring finger protein 30) | (ring finger protein 28, ring finger protein 30) |
| 19003 | 1043 | AI639465 | F | (ring finger protein 28, ring finger protein 30) | (ring finger protein 28, ring finger protein 30) |
| 21975 | 827 | AI172247 | N, B, L | (rosy, xanthine dehydrogenase) | xanthine dehydrogenase |
| 1382 | 438 | AB002406 | G | (RuvB-like 1 (E. coli), RuvB-like protein 1, Yeast hypothetical | (RuvB-like 1 (E. coli), RuvB-like protein 1) |
| | | | | 50.5 KD protein like, pontin) | |
| 19040 | 1152 | J03627 | M, C, G, K | (S100 calcium binding protein A10 (annexin II ligand, calpactin I, | (S100 calcium binding protein A10 (annexin II ligand, calpactin I, |
| | | | | light polypeptide (p11)), S100 calcium binding protein A10 | light polypeptide (p11)), S100 calcium binding protein A10 |
| | | | | (calpactin)) | (calpactin)) |
| 13618 | 929 | AI230724 | M, I | (SAC1 (supressor of actin mutations 1, homolog)-like (S. cerevisiae), | (SAC1 (supressor of actin mutations 1, homolog)-like (S. cerevisiae), |
| | | | | SAC1 suppressor of actin mutations 1-like (yeast), | SAC1 suppressor of actin mutations 1-like (yeast)) |
| | | | | Yeast recessive suppressor RSD1 like) | |
| 13542 | 247 | AA892798 | N, B | (sclerostin domain containing 1, sclerostin-like) | (cystine-knot containing secreted protein, sclerostin-like) |
| 2439 | 479 | AF032668 | A, F | (SEC15 (S. cerevisiae)-like, SEC15 homolog (S. cerevisiae)) | (SEC15 (S. cerevisiae)-like, SEC15 homolog (S. cerevisiae)) |
| 23651 | 1223 | M14656 | M, G, K | (secreted phosphoprotein 1, secreted phosphoprotein 1 | (secreted phosphoprotein 1, secreted phosphoprotein 1 |
| | | | | (osteopontin, bone sialoprotein I, early T-lymphocyte activation | (osteopontin, bone sialoprotein I, early T-lymphocyte activation 1)) |
| | | | | 1)) | |
| 21400 | 1266 | M36410 | C, F | (sepiapterin reductase, sepiapterin reductase (7,8- | (sepiapterin reductase, sepiapterin reductase (7,8- |
| | | | | dihydrobiopterin: NADP+ oxidoreductase)) | dihydrobiopterin: NADP+ oxidoreductase)) |
| 15540 | 1243 | M24067 | K | (serine (or cysteine) proteinase inhibitor, clade E (nexin, | (serine (or cysteine) proteinase inhibitor, clade E (nexin, |
| | | | | plasminogen activator inhibitor type 1), member 1, serine (or | plasminogen activator inhibitor type 1), member 1, serine (or |
| | | | | cysteine) proteinase inhibitor, clade E, member 1) | cysteine) proteinase inhibitor, clade E, member 1) |
| 3549 | 1181 | L11319 | N | (signal peptidase complex, signal peptidase complex (18 kD)) | (signal peptidase complex, signal peptidase complex (18 kD)) |
| 9125 | 67 | AA819338 | N | (signal sequence receptor, delta, signal sequence receptor, delta | (signal sequence receptor, delta, signal sequence receptor, delta |
| | | | | (translocon-associated protein delta)) | (translocon-associated protein delta)) |
| 343 | 1592 | X91810 | L | (signal transducer and activator of transcription 3, signal | (signal transducer and activator of transcription 3, signal transducer |
| | | | | transducer and activator of transcription 3 (acute-phase | and activator of transcription 3 (acute-phase response factor)) |
| | | | | response factor), signal transduction and activation of | |
| | | | | transcription 3) | |
| 23307 | 99 | AA851749 | D | (silica-induced gene 41, splicing factor, arginine/serine-rich 10 | (silica-induced gene 41, splicing factor, arginine/serine-rich 10 |
| | | | | (transformer 2 homolog, Drosophila)) | (transformer 2 homolog, Drosophila)) |
| 24762 | 1362 | NM_181092 | M, D | (similar to KIAA1938 protein, solute carrier family 7 (cationic | solute carrier family 7 (cationic amino acid transporter, y+ system), |
| | | | | amino acid transporter, y+ system), member 8) | member 8 |
| 10267 | 1550 | X57432 | N | (similar to ribosomal protein S2, similar to ribosomal protein S2; | |
| | | | | 40S ribosomal protein S2) | |
| 6796 | 711 | AI102753 | M, B | (similar to RING finger protein 4, similar to ring finger protein 4) | similar to RING finger protein 4 |
| 714 | 1416 | U10279 | N | (similar to solute carrier family 28 (sodium-coupled nucleoside | solute carrier family 28 (sodium-coupled nucleoside transporter), |
| | | | | transporter), member 1, solute carrier family 28 (sodium-coupled | member 1 |
| | | | | nucleoside transporter), member 1) | |
| 7300 | 786 | AI169077 | C | (similar to solute carrier family 7 (cationic amino acid transporter, | solute carrier family 7 (cationic amino acid transporter, y+ system), |
| | | | | y+ system), member 7, solute carrier family 7 (cationic amino | member 7 |
| | | | | acid transporter, y+ system), member 7) | |
| 18528 | 924 | AI230284 | K | (similar to Tropomyosin alpha 4 chain (Tropomyosin 4) | tropomyosin 4 |
| | | | | (TM30p1), tropomyosin 4) | |
| 18529 | 928 | AI230716 | M, K | (similar to Tropomyosin alpha 4 chain (Tropomyosin 4) | tropomyosin 4 |
| | | | | (TM30p1), tropomyosin 4) | |
| 1514 | 1142 | J02780 | N | (similar to Tropomyosin alpha 4 chain (Tropomyosin 4) | tropomyosin 4 |
| | | | | (TM30p1), tropomyosin 4) | |
| 24640 | 1576 | X70521 | N | (sodium channel, nonvoltage-gated 1 alpha, sodium channel, | (sodium channel, nonvoltage-gated 1 alpha, sodium channel, |
| | | | | nonvoltage-gated, type I, alpha polypeptide) | nonvoltage-gated, type I, alpha polypeptide) |
| 24639 | 1584 | X77932 | N | (sodium channel, nonvoltage-gated 1 beta, sodium channel, | (sodium channel, nonvoltage-gated 1 beta, sodium channel, |
| | | | | nonvoltage-gated 1, beta (Liddle syndrome)) | nonvoltage-gated 1, beta (Liddle syndrome)) |
| 117 | 490 | AF049239 | N | (sodium channel, voltage gated, type VIII, alpha, sodium | (sodium channel, voltage gated, type VIII, alpha, sodium channel, |
| | | | | channel, voltage-gated, type VIII, alpha polypeptide) | voltage-gated, type VIII, alpha polypeptide) |
| 645 | 412 | AA965132 | G, K | (solute carrier family 12 (sodium/chloride transporters), member | (solute carrier family 12 (sodium/chloride transporters), member 3, |
| | | | | 3, solute carrier family 12, member 3) | solute carrier family 12, member 3) |
| 646 | 1415 | U10097 | N, G, K | (solute carrier family 12 (sodium/chloride transporters), member | (solute carrier family 12 (sodium/chloride transporters), member 3, |
| | | | | 3, solute carrier family 12, member 3) | solute carrier family 12, member 3) |
| 4532 | 1414 | U10096 | J | (solute carrier family 12 (sodium/potassium/chloride | (solute carrier family 12 (sodium/potassium/chloride transporters), |
| | | | | transporters), member 1, solute carrier family 12, member 1) | member 1, solute carrier family 12, member 1) |
| 23826 | 1451 | U38180 | N | (solute carrier family 19 (folate transporter), member 1, solute | (solute carrier family 19 (folate transporter), member 1, solute carrier |
| | | | | carrier family 19 (sodium/hydrogen exchanger), member 1) | family 19 (sodium/hydrogen exchanger), member 1) |
| 24770 | 1191 | L19031 | M, N, G, I, J | (solute carrier family 21 (organic anion transporter), member 1, | (solute carrier family 21 (organic anion transporter), member 1, |
| | | | | solute carrier family 21 (organic anion transporter), member 3) | solute carrier family 21 (organic anion transporter), member 3) |
| 1622 | 1300 | M80804 | N | (solute carrier family 3 (cystine, dibasic and neutral amino acid | (solute carrier family 3 (cystine, dibasic and neutral amino acid |
| | | | | transporters, activator of cystine, dibasic and neutral amino acid | transporters, activator of cystine, dibasic and neutral amino acid |
| | | | | transport), member 1, solute carrier family 3, member 1) | transport), member 1, solute carrier family 3, member 1) |
| 18078 | 176 | AA891726 | N | (solute carrier family 34 (sodium phosphate), member 1, solute | solute carrier family 34 (sodium phosphate), member 1 |
| | | | | carrier family 34 (sodium phosphate), member 2) | |
| 18075 | 454 | AB013455 | N | (solute carrier family 34 (sodium phosphate), member 1, solute | solute carrier family 34 (sodium phosphate), member 1 |
| | | | | carrier family 34 (sodium phosphate), member 2) | |
| 18076 | 454 | AB013455 | N | (solute carrier family 34 (sodium phosphate), member 1, solute | solute carrier family 34 (sodium phosphate), member 1 |
| | | | | carrier family 34 (sodium phosphate), member 2) | |
| 18077 | 740 | AI105198 | N | (solute carrier family 34 (sodium phosphate), member 1, solute | solute carrier family 34 (sodium phosphate), member 1 |
| | | | | carrier family 34 (sodium phosphate), member 2) | |
| 4956 | 1485 | U76714 | H | (solute carrier family 39 (iron-regulated transporter), member 1, | solute carrier family 40 (iron-regulated transporter), member 1 |
| | | | | solute carrier family 40 (iron-regulated transporter), member 1) | |
| 4957 | 1485 | U76714 | N | (solute carrier family 39 (iron-regulated transporter), member 1, | solute carrier family 40 (iron-regulated transporter), member 1 |
| | | | | solute carrier family 40 (iron-regulated transporter), member 1) | |
| 1511 | 463 | AF004017 | D | (solute carrier family 4 (anion exchanger), member 4, solute | (solute carrier family 4 (anion exchanger), member 4, solute carrier |
| | | | | carrier family 4, sodium bicarbonate cotransporter, member 4) | family 4, sodium bicarbonate cotransporter, member 4) |
| 1877 | 1579 | X74593 | A, D, E | (Sorbitol dehydrogenase 1, sorbitol dehydrogenase) | sorbitol dehydrogenase |
| 20702 | 946 | AI231821 | N | (stathmin 1, stathmin 1/oncoprotein 18) | (stathmin 1, stathmin 1/oncoprotein 18) |
| 17514 | 324 | AA925554 | E, G | (Succinyl coenzyme A synthetase flavoprotein subunit, | succinate dehydrogenase complex, subunit A, flavoprotein (Fp) |
| | | | | flavoprotein, succinate dehydrogenase complex, subunit A, | |
| | | | | flavoprotein (Fp)) | |
| 4748 | 1192 | L19998 | N | (sulfotransferase family 1A, phenol-preferring, member 1, | (sulfotransferase family 1A, phenol-preferring, member 1, |
| | | | | sulfotransferase family, cytosolic, 1A, phenol-preferring, member | sulfotransferase family, cytosolic, 1A, phenol-preferring, member 1) |
| | | | | 1) | |
| 4749 | 1192 | L19998 | N, L | (sulfotransferase family 1A, phenol-preferring, member 1, | (sulfotransferase family 1A, phenol-preferring, member 1, |
| | | | | sulfotransferase family, cytosolic, 1A, phenol-preferring, member | sulfotransferase family, cytosolic, 1A, phenol-preferring, member 1) |
| | | | | 1) | |
| 10015 | 509 | AF083269 | M, G, K | (Suppressor of profilin 2, actin related protein ⅔ complex, | (actin related protein ⅔ complex, subunit 1B, actin related protein |
| | | | | subunit 1B, actin related protein ⅔ complex, subunit 1B, 41 kDa) | ⅔ complex, subunit 1B, 41 kDa) |
| 10016 | 509 | AF083269 | M, G | (Suppressor of profilin 2, actin related protein ⅔ complex, | (actin related protein ⅔ complex, subunit 1B, actin related protein |
| | | | | subunit 1B, actin related protein ⅔ complex, subunit 1B, 41 kDa) | ⅔ complex, subunit 1B, 41 kDa) |
| 15800 | 481 | AF035822 | A | (synaptosomal-associated protein, synaptosomal-associated | (synaptosomal-associated protein, synaptosomal-associated |
| | | | | protein, 29 kDa) | protein, 29 kDa) |
| 3995 | 566 | AI011678 | M, I, K | (syndecan 2, syndecan 2 (heparan sulfate proteoglycan 1, cell | (syndecan 2, syndecan 2 (heparan sulfate proteoglycan 1, cell |
| | | | | surface-associated, fibroglycan)) | surface-associated, fibroglycan)) |
| 1529 | 1302 | M81687 | M, B, F, I | (syndecan 2, syndecan 2 (heparan sulfate proteoglycan 1, cell | (syndecan 2, syndecan 2 (heparan sulfate proteoglycan 1, cell |
| | | | | surface-associated, fibroglycan)) | surface-associated, fibroglycan)) |
| 19768 | 222 | AA892373 | M, C, G | (syndecan binding protein, syndecan binding protein (syntenin)) | (syndecan binding protein, syndecan binding protein (syntenin)) |
| 3407 | 423 | AA997953 | F | (TCF3 (E2A) fusion partner, TCF3 (E2A) fusion partner (in | (TCF3 (E2A) fusion partner, TCF3 (E2A) fusion partner (in childhood |
| | | | | childhood Leukemia)) | Leukemia)) |
| 24626 | 1581 | X75856 | N | (testis enhanced gene transcript, testis enhanced gene transcript | (testis enhanced gene transcript, testis enhanced gene transcript |
| | | | | (BAX inhibitor 1)) | (BAX inhibitor 1)) |
| 18902 | 158 | AA875390 | N | (thioredoxin-like, thioredoxin-like, 32 kDa) | (thioredoxin-like, thioredoxin-like, 32 kDa) |
| 21122 | 1546 | X56228 | N, E | (thiosulfate sulfurtransferase (rhodanese), thiosulfate | (thiosulfate sulfurtransferase (rhodanese), thiosulfate |
| | | | | sulfurtransferase, mitochondrial) | sulfurtransferase, mitochondrial) |
| 21123 | 1546 | X56228 | N, D | (thiosulfate sulfurtransferase (rhodanese), thiosulfate | (thiosulfate sulfurtransferase (rhodanese), thiosulfate |
| | | | | sulfurtransferase, mitochondrial) | sulfurtransferase, mitochondrial) |
| 19402 | 140 | AA874848 | N | (Thy-1 co-transcribed, thymus cell antigen 1, theta) | (Thy-1 co-transcribed, thymus cell antigen 1, theta) |
| 1814 | 1253 | M31174 | N | (thyroid hormone receptor alpha, thyroid hormone receptor, | (thyroid hormone receptor alpha, thyroid hormone receptor, alpha |
| | | | | alpha (erythroblastic leukemia viral (v-erb-a) oncogene homolog, | (erythroblastic leukemia viral (v-erb-a) oncogene homolog, avian)) |
| | | | | avian)) | |
| 20919 | 756 | AI112516 | N | (Tis11 homolog, wu: fb80h11, zinc finger protein 36, C3H type- | zinc finger protein 36, C3H type-like 1 |
| | | | | like 1) | |
| 20920 | 763 | AI136891 | N | (Tis11 homolog, wu: fb80h11, zinc finger protein 36, C3H type- | zinc finger protein 36, C3H type-like 1 |
| | | | | like 1) | |
| 16039 | 9 | AA799452 | H | (Transaldolase, transaldolase 1) | transaldolase 1 |
| 7505 | 282 | AA893702 | N, A | (transcobalamin 2, transcobalamin II; macrocytic anemia) | (transcobalamin 2, transcobalamin II; macrocytic anemia) |
| 17377 | 1514 | X13058 | N | (transformation related protein 53, tumor protein p53 (Li- | (transformation related protein 53, tumor protein p53 (Li-Fraumeni |
| | | | | Fraumeni syndrome)) | syndrome)) |
| 17284 | 1145 | J02827 | N, G | (Transketolase, branched chain keto acid dehydrogenase E1, | (branched chain keto acid dehydrogenase E1, alpha polypeptide |
| | | | | alpha polypeptide (maple syrup urine disease), branched chain | (maple syrup urine disease), branched chain ketoacid |
| | | | | ketoacid dehydrogenase E1, alpha polypeptide) | dehydrogenase E1, alpha polypeptide) |
| 17285 | 1145 | J02827 | N | (Transketolase, branched chain keto acid dehydrogenase E1, | (branched chain keto acid dehydrogenase E1, alpha polypeptide |
| | | | | alpha polypeptide (maple syrup urine disease), branched chain | (maple syrup urine disease), branched chain ketoacid |
| | | | | ketoacid dehydrogenase E1, alpha polypeptide) | dehydrogenase E1, alpha polypeptide) |
| 20804 | 567 | AI011684 | H | (transketolase, transketolase (Wernicke-Korsakoff syndrome)) | (transketolase, transketolase (Wernicke-Korsakoff syndrome)) |
| 20802 | 655 | AI059508 | N, H | (transketolase, transketolase (Wernicke-Korsakoff syndrome)) | (transketolase, transketolase (Wernicke-Korsakoff syndrome)) |
| 20803 | 1413 | U09256 | N, B, H, I | (transketolase, transketolase (Wernicke-Korsakoff syndrome)) | (transketolase, transketolase (Wernicke-Korsakoff syndrome)) |
| 6641 | 1613 | Z49858 | M, A, I | (transmembrane 4 superfamily member 11, transmembrane 4 | (transmembrane 4 superfamily member 11, transmembrane 4 |
| | | | | superfamily member 11 (plasmolipin)) | superfamily member 11 (plasmolipin)) |
| 24843 | 1301 | M80826 | N, J | (trefoil factor 3 (intestinal), trefoil factor 3, intestinal) | (trefoil factor 3 (intestinal), trefoil factor 3, intestinal) |
| 15489 | 1458 | U50194 | F | (Tripeptidyl-peptidase II, tripeptidyl peptidase II) | tripeptidyl peptidase II |
| 455 | 1225 | M15474 | N, E | (Tropomyosin 1, tropomyosin 1 (alpha), tropomyosin 1, alpha) | (tropomyosin 1 (alpha), tropomyosin 1, alpha) |
| 457 | 1282 | M60666 | E, G, K | (Tropomyosin 1, tropomyosin 1 (alpha), tropomyosin 1, alpha) | (tropomyosin 1 (alpha), tropomyosin 1, alpha) |
| 17161 | 219 | AA892333 | M | (tubulin, alpha 1, tubulin, alpha 3) | (tubulin, alpha 1, tubulin, alpha 3) |
| 17160 | 792 | AI169370 | N | (tubulin, alpha 1, tubulin, alpha 3) | (tubulin, alpha 1, tubulin, alpha 3) |
| 17159 | 1131 | J00797 | M, G, K | (tubulin, alpha 1, tubulin, alpha 3) | (tubulin, alpha 1, tubulin, alpha 3) |
| 17158 | 1496 | V01227 | N | (tubulin, alpha 1, tubulin, alpha 3) | tubulin, alpha 1, tubulin, alpha 3) |
| 23314 | 393 | AA957270 | H, I | (tumor necrosis factor receptor superfamily, member 12A, tumor | (tumor necrosis factor receptor superfamily, member 12A, tumor |
| | | | | necrosis factor receptor superfamily, member 12a) | necrosis factor receptor superfamily, member 12a) |
| 18647 | 1379 | S69316 | N | (tumor rejection antigen (gp96) 1, tumor rejection antigen gp96) | |
| 15376 | 153 | AA875206 | N | (ubiquilin 1, wu: fb48e11) | ubiquilin 1 |
| 17378 | 1284 | M62388 | N, D | (Ubiquitin conjugating enzyme, ubiquitin conjugating-protein, | (ubiquitin-conjugating enzyme E2B (RAD6 homolog), ubiquitin- |
| | | | | ubiquitin-conjugating enzyme E2B (RAD6 homolog), ubiquitin- | conjugating enzyme E2B, RAD6 homology (S. cerevisiae)) |
| | | | | conjugating enzyme E2B, RAD6 homology (S. cerevisiae)) | |
| 15126 | 1113 | D83796 | N | (UDP glycosyltransferase 1 family, polypeptide A cluster, UDP | |
| | | | | glycosyltransferase 1 family, polypeptide A6, similar to phenol | |
| | | | | UDP-glucuronosyltransferase) | |
| 15124 | 1134 | J02612 | N, B | (UDP glycosyltransferase 1 family, polypeptide A cluster, UDP | |
| | | | | glycosyltransferase 1 family, polypeptide A6, similar to phenol | |
| | | | | UDP-glucuronosyltransferase) | |
| 15125 | 1162 | J05132 | N, B | (UDP glycosyltransferase 1 family, polypeptide A cluster, UDP | |
| | | | | glycosyltransferase 1 family, polypeptide A6, similar to phenol | |
| | | | | UDP-glucuronosyltransferase) | |
| 15127 | 1370 | S56937 | N | (UDP glycosyltransferase 1 family, polypeptide A cluster, UDP | |
| | | | | glycosyltransferase 1 family, polypeptide A6, similar to phenol | |
| | | | | UDP-glucuronosyltransferase) | |
| 10241 | 489 | AF048687 | N, C, K | (UDP-Gal:betaGlcNAc beta 1,4-galactosyltransferase, | (UDP-Gal:betaGlcNAc beta 1,4-galactosyltransferase, polypeptide |
| | | | | polypeptide 6, UDP-Gal:betaGlcNAc beta 1,4- | 6, UDP-Gal:betaGlcNAc beta 1,4-galactosyltransferase, polypeptide |
| | | | | galactosyltransferase, polypeptide 6) | 6) |
| 18597 | 455 | AB013732 | N, B, H | (UDP-glucose dehydrogenase, UDP-glucose dehydrogenase, | UDP-glucose dehydrogenase |
| | | | | SQuashed Vulva, sugarless) | |
| 16211 | 1386 | S75960 | N | (uromodulin, uromodulin (uromucoid, Tamm-Horsfall | (uromodulin, uromodulin (uromucoid, Tamm-Horsfall glycoprotein)) |
| | | | | glycoprotein)) | |
| 2979 | 289 | AA894099 | H | (vacuolar protein sorting 4A (yeast), vacuolar protein sorting 4a | (vacuolar protein sorting 4A (yeast), vacuolar protein sorting 4a |
| | | | | (yeast), wu: fc57d08) | (yeast)) |
| 20443 | 1422 | U14192 | H | (vesicle docking protein, vesicle docking protein p115) | (vesicle docking protein, vesicle docking protein p115) |
| 4594 | 1599 | Y07704 | N | (viperin, viral hemorrhagic septicemia virus(VHSV) induced gene | (viperin, viral hemorrhagic septicemia virus(VHSV) induced gene 1) |
| | | | | 1) | |
| 989 | 1464 | U56242 | N, D, F | (v-maf musculoaponeurotic fibrosarcoma (avian) oncogene | v-maf musculoaponeurotic fibrosarcoma oncogene homolog (avian) |
| | | | | homolog, v-maf musculoaponeurotic fibrosarcoma oncogene | |
| | | | | homolog (avian)) | |
| 1424 | 1423 | U14746 | N | (von Hippel-Lindau syndrome, von Hippel-Lindau syndrome | (von Hippel-Lindau syndrome, von Hippel-Lindau syndrome |
| | | | | homolog) | homolog) |
| 24900 | 1420 | U12973 | N, H | (X transporter protein 2, hypothetical protein FLJ31236) | (X transporter protein 2, similar to X transporter protein 2) |
| 13930 | 31 | AA800613 | M | (zinc finger protein 36, zinc finger protein 36, C3H type, homolog | (zinc finger protein 36, zinc finger protein 36, C3H type, homolog |
| | | | | (mouse)) | (mouse)) |
| 23868 | 474 | AF023087 | M, L | (Zinc finger, C2H2 type (3 domains), early growth response 1, | early growth response 1 |
| | | | | stripe) | |
| 23872 | 1231 | M18416 | M | (Zinc finger, C2H2 type (3 domains), early growth response 1, | early growth response 1 |
| | | | | stripe) | |
| 23869 | 1479 | U75397 | L | (Zinc finger, C2H2 type (3 domains), early growth response 1, | early growth response 1 |
| | | | | stripe) | |
| 1399 | 1508 | X07467 | M, H, I | (Zwischenferment, glucose-6-phosphate dehydrogenase, | (glucose-6-phosphate dehydrogenase, glucose-6-phosphate |
| | | | | glucose-6-phosphate dehydrogenase 2, glucose-6-phosphate-1- | dehydrogenase 2) |
| | | | | dehydrogenase) | |
| 15408 | 1060 | D00569 | N | 2,4-dienoyl CoA reductase 1, mitochondrial | 2,4-dienoyl CoA reductase 1, mitochondrial |
| 15409 | 1060 | D00569 | N, L | 2,4-dienoyl CoA reductase 1, mitochondrial | 2,4-dienoyl CoA reductase 1, mitochondrial |
| 20493 | 1090 | D28339 | M, N | 3-hydroxyanthranilate 3,4-dioxygenase | 3-hydroxyanthranilate 3,4-dioxygenase |
| 20494 | 1103 | D44494 | N, E | 3-hydroxyanthranilate 3,4-dioxygenase | 3-hydroxyanthranilate 3,4-dioxygenase |
| 22626 | 811 | AI171159 | M, K | a disintegrin-like and metalloprotease (reprolysin type) with | a disintegrin-like and metalloprotease (reprolysin type) with |
| | | | | thrombospondin 1 type motif, 1 | thrombospondin type 1 motif, 1 |
| 347 | 1400 | U01914 | D | A kinase (PRKA) anchor protein 8 | A kinase (PRKA) anchor protein 8 |
| 24649 | 991 | AI234950 | C, K | acid phosphatase 2, lysosomal | acid phosphatase 2, lysosomal |
| 24431 | 1285 | M63282 | M, F | activating transcription factor 3 | activating transcripion factor 3 |
| 13104 | 552 | AI010224 | D | adducin 3 (gamma) | adducin 3 (gamma) |
| 16708 | 1465 | U57042 | M, N | adenosine kinase | adenosine kinase |
| 16272 | 1582 | X76456 | N | afamin | afamin |
| 820 | 225 | AA892395 | N | aldolase B, fructose-bisphosphate | aldolase B, fructose-bisphosphate |
| 818 | 1497 | X02291 | N | aldolase B, fructose-bisphosphate | aldolase B, fructose-bisphosphate |
| 15032 | 1490 | U89905 | M, A, H, I, K, L | alpha-methylacyl-CoA racemase | alpha-methylacyl-CoA racemase |
| 18564 | 33 | AA800745 | M | aminolevulinate, delta-, dehydratase | aminolevulinate, delta-, dehydratase |
| 7197 | 820 | AI171962 | M, G, K, L | annexin A1 | annexin A1 |
| 7196 | 1371 | S57478 | M, E, G, K | annexin A1 | annexin A1 |
| 574 | 1182 | L13039 | M, E, G, K | annexin A2 | annexin A2 |
| 16649 | 491 | AF051895 | M, N, E | annexin A5 | annexin A5 |
| 16650 | 1101 | D42137 | E | annexin A5 | annexin A5 |
| 1509 | 435 | AB000507 | N, A | aquaporin 7 | aquaporin 7 |
| 18727 | 1078 | D13978 | N | argininosuccinate lyase | argininosuccinate lyase |
| 21339 | 409 | AA964962 | J, L | ATP-binding cassette, sub-family A (ABC1), member 1 | ATP-binding cassette, sub-family A (ABC1), member 1 |
| 15701 | 447 | AB010467 | A, I | ATP-binding cassette, sub-family C (CFTR/MRP), member 3 | ATP-binding cassette, sub-family C (CFTR/MRP), member 3 |
| 4361 | 1127 | H31839 | N | BCL2-antagonist/killer 1 | BCL2-antagonist/killer 1 |
| 439 | 1609 | Z22607 | N, F | bone morphogenetic protein 4 | bone morphogenetic protein 4 |
| 18246 | 1081 | D14441 | N, B, F | brain abundant, membrane attached signal protein 1 | brain abundant, membrane attached signal protein 1 |
| 24643 | 1477 | U68417 | N, K | branched chain aminotransferase 2, mitochondrial | branched chain aminotransferase 2, mitochondrial |
| 16967 | 1337 | NM_013146 | E | caldesmon 1 | caldesmon 1 |
| 355 | 1375 | S66024 | N | cAMP responsive element modulator | cAMP responsive element modulator |
| 356 | 1375 | S66024 | N | cAMP responsive element modulator | cAMP responsive element modulator |
| 20555 | 1439 | U26033 | F | carnitine O-octanoyltransferase | carnitine O-octanoyltransferase |
| 9109 | 1269 | M38135 | N | cathepsin H | cathepsin H |
| 1894 | 1176 | L03201 | N, B, L | cathepsin S | cathepsin S |
| 21682 | 635 | AI045030 | N | CCAAT/enhancer binding protein (C/EBP), delta | CCAAT/enhancer binding protein (C/EBP), delta |
| 21683 | 1290 | M65149 | M, C, I, L | CCAAT/enhancer binding protein (C/EBP), delta | CCAAT/enhancer binding protein (C/EBP), delta |
| 4412 | 26 | AA800005 | N | CD151 antigen | CD151 antigen |
| 12903 | 1538 | X53517 | N | CD37 antigen | CD37 antigen |
| 985 | 492 | AF053312 | N | chemokine (C—C motif) ligand 20 | chemokine (C—C motif) ligand 20 |
| 1306 | 1065 | D10262 | N | choline kinase | choline kinase |
| 24484 | 1454 | U42976 | H | cholinergic receptor, nicotinic, beta polypeptide 4 | cholinergic receptor, nicotinic, beta polypeptide 4 |
| 16350 | 1056 | AJ011811 | G | claudin 7 | claudin 7 |
| 16351 | 1056 | AJ011811 | G | claudin 7 | claudin 7 |
| 15259 | 870 | AI178135 | N | complement component 1, q subcomponent binding protein | complement component 1, q subcomponent binding protein |
| 21443 | 1577 | X71127 | M, L | complement component 1, q subcomponent, beta polypeptide | complement component 1, q subcomponent, beta polypeptide |
| 954 | 460 | AF000114 | B | contactin associated protein 1 | contactin associated protein 1 |
| 3454 | 477 | AF030091 | N, J | cyclin L1 | cyclin L1 |
| 15028 | 336 | AA942685 | N, F | cysteine dioxygenase, type I | cysteine dioxygenase, type I |
| 25024 | 1124 | E03229 | N | cysteine dioxygenase, type I | cysteine dioxygenase, type I |
| 1203 | 1049 | AJ000485 | N | cytoplasmic linker 2 | cytoplasmic linker 2 |
| 17226 | 1612 | Z36980 | N, C, E | D-dopachrome tautomerase | D-dopachrome tautomerase |
| 17227 | 1612 | Z36980 | N, E | D-dopachrome tautomerase | D-dopachrome tautomerase |
| 18354 | 1559 | X59859 | J | decorin | decorin |
| 3279 | 717 | AI103224 | F | dehydrogenase/reductase (SDR family) member 4 | dehydrogenase/reductase (SDR family) member 4 |
| 19679 | 1042 | AI639418 | M, A, D, G, I | deiodinase, iodothyronine, type I | deiodinase, iodothyronine, type I |
| 19678 | 1552 | X57999 | M | deiodinase, iodothyronine, type I | deiodinase, iodothyronine, type I |
| 20886 | 1484 | U76635 | E, G | deoxyribonuclease I | deoxyribonuclease I |
| 20887 | 1484 | U76635 | N, E, G | deoxyribonuclease I | deoxyribonuclease I |
| 17684 | 220 | AA892345 | M, I | dimethylglycine dehydrogenase precursor | dimethylglycine dehydrogenase precursor |
| 15616 | 570 | AI011998 | N | DnaJ (Hsp40) homolog, subfamily B, member 9 | DnaJ (Hsp40) homolog, subfamily B, member 9 |
| 16227 | 777 | AI145177 | F | early growth response 4 | early growth response 4 |
| 20865 | 1175 | L00117 | M, N | elastase 1, pancreatic | elastase 1, pancreatic |
| 21562 | 1525 | X15958 | N, A | enoyl Coenzyme A hydratase, short chain, 1, mitochondrial | enoyl Coenzyme A hydratase, short chain, 1, mitochondrial |
| 797 | 1452 | U38253 | N | eukaryotic translation initiation factor 2B, subunit 3 gamma, | eukaryotic translation initiation factor 2B, subunit 3 gamma, 58 kDa |
| | | | | 58 kDa | |
| 1570 | 1404 | U05014 | A | eukaryotic translation initiation factor 4E binding protein 1 | eukaryotic translation initiation factor 4E binding protein 1 |
| 18713 | 585 | AI012604 | N, L | eukaryotic translation initiation factor 5 | eukaryotic translation initiation factor 5 |
| 18716 | 1345 | NM_020075 | F | eukaryotic translation initiation factor 5 | eukaryotic translation initiation factor 5 |
| 6451 | 148 | AA875033 | N | fibulin 5 | fibulin 5 |
| 23445 | 1310 | M84719 | M, N | flavin containing monooxygenase 1 | flavin containing monooxygenase 1 |
| 2242 | 586 | AI012635 | M, H, I, J | flavin containing monooxygenase 3 | flavin containing monooxygenase 3 |
| 5601 | 958 | AI232461 | M, I | flavin containing monooxygenase 4 | flavin containing monooxygenase 4 |
| 1143 | 1343 | NM_019280 | A | gap junction protein, alpha 5, 40 kDa (connexin 40) | gap junction protein, alpha 5, 40 kDa (connexin 40) |
| 617 | 1179 | L08831 | N | gastric inhibitory polypeptide | gastric inhibitory polypeptide |
| 1678 | 1331 | M96674 | N | glucagon receptor | glucagon receptor |
| 11153 | 1320 | M91652 | N | glutamate-ammonia ligase (glutamine synthase) | glutamate-ammonia ligase (glutamine synthase) |
| 5206 | 327 | AA925755 | E | glutaminase | glutaminase |
| 20717 | 844 | AI176504 | N | glutaminase | glutaminase |
| 6405 | 1208 | L38615 | G | glutathione synthetase | glutathione synthetase |
| 6406 | 1208 | L38615 | N | glutathione synthetase | glutathione synthetase |
| 22554 | 353 | AA945076 | M, I | glycerol kinase | glycerol kinase |
| 1550 | 1504 | X06150 | N | glycine N-methyltransferase | glycine N-methyltransferase |
| 1551 | 1504 | X06150 | N, G | glycine N-methyltransferase | glycine N-methyltransferase |
| 17524 | 559 | AI010568 | M, A, I | growth hormone receptor | growth hormone receptor |
| 10887 | 1617 | Z83757 | M, I | growth hormone receptor | growth hormone receptor |
| 1546 | 1489 | U85512 | M, N, G | GTP cyclohydrolase I feedback regulatory protein | GTP cyclohydrolase I feedback regulatory protein |
| 14184 | 126 | AA859837 | M | guanine deaminase | guanine deaminase |
| 14185 | 126 | AA859837 | M | guanine deaminase | guanine deaminase |
| 1246 | 1273 | M57507 | M, J | guanylate cyclase 1, soluble, beta 2 | guanylate cyclase 1, soluble, beta 2 |
| 16081 | 888 | AI179610 | N | heme oxygenase (decycling) 1 | heme oxygenase (decycling) 1 |
| 16080 | 1138 | J02722 | N | heme oxygenase (decycling) 1 | heme oxygenase (decycling) 1 |
| 17832 | 573 | AI012182 | J | hemoglobin, beta | hemoglobin, beta |
| 17833 | 868 | AI177992 | F | hemoglobin, beta | hemoglobin, beta |
| 17829 | 884 | AI179576 | N, J | hemoglobin, beta | hemoglobin, beta |
| 25468 | 1324 | M94918 | N, J | hemoglobin, beta | hemoglobin, beta |
| 6758 | 592 | AI013394 | B, L | heparan sulfate (glucosamine) 3-O-sulfotransferase 1 | heparan sulfate (glucosamine) 3-O-sulfotransferase 1 |
| 4235 | 733 | AI104524 | M, H, K, L | heterogeneous nuclear ribonucleoprotein A/B | heterogeneous nuclear ribonucleoprotein A/B |
| 16012 | 1567 | X62875 | M, I | high mobility group AT-hook 1 | high mobility group AT-hook 1 |
| 15434 | 531 | AI008836 | N | high-mobility group box 2 | high-mobility group box 2 |
| 15437 | 1114 | D84418 | E | high-mobility group box 2 | high-mobility group box 2 |
| 3610 | 776 | AI145151 | M, G, I, J | histamine N-methyltransferase | histamine N-methyltransferase |
| 3608 | 1067 | D10693 | M, J | histamine N-methyltransferase | histamine N-methyltransferase |
| 3609 | 1395 | S82579 | N, F | histamine N-methyltransferase | histamine N-methyltransferase |
| 15750 | 443 | AB007690 | H | homer homolog 2 (Drosophila) | homer homolog 2 (Drosophila) |
| 24631 | 1096 | D37951 | F | human immunodeficiency virus type I enhancer binding protein 2 | human immunodeficiency virus type I enhancer binding protein 2 |
| 1962 | 434 | AB000199 | J | hydroxy-delta-5-steroid dehydrogenase, 3 beta- and steroid delta | hydroxy-delta-5-steroid dehydrogenase, 3 beta- and steroid delta- |
| | | | | isomerase 7 | isomerase 7 |
| 23660 | 747 | AI105448 | N | hydroxysteroid (11-beta) dehydrogenase 1 | hydroxysteroid (11-beta) dehydrogenase 1 |
| 15174 | 1469 | U59809 | N | insulin-like growth factor 2 receptor | insulin-like growth factor 2 receptor |
| 16982 | 1278 | M58634 | M, B, L | insulin-like growth factor binding protein 1 | insulin-like growth factor binding protein 1 |
| 15097 | 535 | AI009405 | N | insulin-like growth factor binding protein 3 | insulin-like growth factor binding protein 3 |
| 24893 | 614 | AI029920 | B | insulin-like growth factor binding protein 5 | insulin-like growth factor binding protein 5 |
| 21193 | 1291 | M69055 | F | insulin-like growth factor binding protein 6 | |
| 21977 | 1365 | S46785 | A, B | insulin-like growth factor binding protein, acid labile subunit | insulin-like growth factor binding protein, acid labile subunit |
| 25480 | 1365 | S46785 | N | insulin-like growth factor binding protein, acid labile subunit | insulin-like growth factor binding protein, acid labile subunit |
| 20126 | 1263 | M34253 | N, K | interferon regulatory factor 1 | interferon regulatory factor 1 |
| 17908 | 604 | AI014163 | M | interferon-related developmental regulator 1 | interferon-related developmental regulator 1 |
| 2632 | 456 | AB016489 | A, D | jumping translocation breakpoint | jumping translocation breakpoint |
| 3584 | 716 | AI103106 | E | lamin B1 | lamin B1 |
| 3049 | 889 | AI179892 | M | lipocalin 7 | lipocalin 7 |
| 3050 | 939 | AI231321 | M | lipocalin 7 | lipocalin 7 |
| 408 | 250 | AA892810 | M | low density lipoprotein receptor-related protein associated | low density lipoprotein receptor-related protein associated protein 1 |
| | | | | protein 1 | |
| 410 | 532 | AI008974 | M, E | low density lipoprotein receptor-related protein associated | low density lipoprotein receptor-related protein associated protein 1 |
| | | | | protein 1 | |
| 409 | 953 | AI232268 | M, N, I | low density lipoprotein receptor-related protein associated | low density lipoprotein receptor-related protein associated protein 1 |
| | | | | protein 1 | |
| 406 | 1606 | Z11995 | M | low density lipoprotein receptor-related protein associated | low density lipoprotein receptor-related protein associated protein 1 |
| | | | | protein 1 | |
| 407 | 1606 | Z11995 | N, C | low density lipoprotein receptor-related protein associated | low density lipoprotein receptor-related protein associated protein 1 |
| | | | | protein 1 | |
| 1946 | 1338 | NM_017061 | F | lysyl oxidase | lysyl oxidase |
| 1943 | 1388 | S77494 | N, L | lysyl oxidase | lysyl oxidase |
| 13151 | 571 | AI012030 | M | matrix Gla protein | matrix Gla protein |
| 7690 | 1346 | NM_022284 | M | melanoma antigen, family D, 1 | melanoma antigen, family D, 1 |
| 17357 | 1317 | M88601 | M, F, G, I, L | meprin A, beta | meprin A, beta |
| 16354 | 1108 | D50564 | N, C | mercaptopyruvate sulfurtransferase | mercaptopyruvate sulfurtransferase |
| 15017 | 1153 | J03752 | N, B | microsomal glutathione S-transferase 1 | microsomal glutathione S-transferase 1 |
| 13938 | 1339 | NM_017212 | N | microtubule-associated protein tau | microtubule-associated protein tau |
| 13939 | 1339 | NM_017212 | D | microtubule-associated protein tau | microtubule-associated protein tau |
| 13940 | 1587 | X79321 | N, D | microtubule-associated protein tau | microtubule-associated protein tau |
| 25235 | 1052 | AJ001290 | F | mitochondrial ribosomal protein S6 | mitochondrial ribosomal protein S6 |
| 14956 | 1286 | M64301 | N | mitogen-activated protein kinase 6 | mitogen-activated protein kinase 6 |
| 14957 | 1286 | M64301 | N | mitogen-activated protein kinase 6 | mitogen-activated protein kinase 6 |
| 15291 | 748 | AI111401 | D | multiple inositol polyphosphate histidine phosphatase, 1 | multiple inositol polyphosphate histidine phosphatase, 1 |
| 17448 | 912 | AI229637 | N | MYB binding protein (P160) 1a | MYB binding protein (P160) 1a |
| 1698 | 1137 | J02679 | M, B, H, I | NAD(P)H dehydrogenase, quinone 1 | NAD(P)H dehydrogenase, quinone 1 |
| 4484 | 213 | AA892258 | N | NADPH oxidase 4 | NADPH oxidase 4 |
| 18008 | 1350 | NM_031588 | N | neuregulin 1 | neuregulin 1 |
| 18005 | 1401 | U02320 | N | neuregulin 1 | neuregulin 1 |
| 18011 | 1402 | U02322 | M, H | neuregulin 1 | neuregulin 1 |
| 20708 | 441 | AB006461 | A | neurochondrin | neurochondrin |
| 968 | 1119 | D86745 | G, K | nuclear receptor subfamily 0, group B, member 2 | nuclear receptor subfamily 0, group B, member 2 |
| 15022 | 38 | AA801029 | N | nuclear receptor subfamily 2, group F, member 6 | nuclear receptor subfamily 2, group F, member 6 |
| 1490 | 1473 | U63839 | E | nucleoporin like 1 | nucleoporin like 1 |
| 24264 | 927 | AI230712 | M | paired basic amino acid cleaving system 4 | paired basic amino acid cleaving system 4 |
| 20457 | 452 | AB012944 | M, B, K, L | parathyroid hormone receptor 1 | parathyroid hormone receptor 1 |
| 20458 | 1202 | L31394 | M, I, K, L | parathyroid hormone receptor 1 | parathyroid hormone receptor 1 |
| 1581 | 1435 | U23769 | M, A, C | PDZ and LIM domain 1 (elfin) | PDZ and LIM domain 1 (elfin) |
| 1081 | 466 | AF013145 | M, D | PDZ domain containing 1 | PDZ domain containing 1 |
| 19998 | 964 | AI232999 | M | PDZ domain containing 1 | PDZ domain containing 1 |
| 1650 | 46 | AA817825 | A | peptidylglycine alpha-amidating monooxygenase | peptidylglycine alpha-amidating monooxygenase |
| 1644 | 167 | AA891068 | A, F | peptidylglycine alpha-amidating monooxygenase | peptidylglycine alpha-amidating monooxygenase |
| 1649 | 724 | AI103782 | F | peptidylglycine alpha-amidating monooxygenase | peptidylglycine alpha-amidating monooxygenase |
| 1651 | 896 | AI228068 | A, H | peptidylglycine alpha-amidating monooxygenase | peptidylglycine alpha-amidating monooxygenase |
| 1652 | 914 | AI229728 | A | peptidylglycine alpha-amidating monooxygenase | peptidylglycine alpha-amidating monooxygenase |
| 1653 | 980 | AI233806 | A | peptidylglycine alpha-amidating monooxygenase | peptidylglycine alpha-amidating monooxygenase |
| 17477 | 305 | AA924029 | M, K, L | phospholipid scramblase 1 | phospholipid scramblase 1 |
| 1847 | 1529 | X16555 | B | phosphoribosyl pyrophosphate synthetase 2 | phosphoribosyl pyrophosphate synthetase 2 |
| 6554 | 517 | AF097723 | N | plasma glutamate carboxypeptidase | plasma glutamate carboxypeptidase |
| 46 | 1242 | M23697 | N | plasminogen activator, tissue | plasminogen activator, tissue |
| 19031 | 666 | AI070532 | M, L | pleckstrin homology-like domain, family A, member 1 | pleckstrin homology-like domain, family A, member 1 |
| 108 | 1185 | L14002 | J | polymeric immunoglobulin receptor | polymeric immunoglobulin receptor |
| 109 | 1187 | L14004 | N | polymeric immunoglobulin receptor | polymeric immunoglobulin receptor |
| 5295 | 332 | AA926247 | M, L | potassium channel, subfamily K, member 1 | potassium channel, subfamily K, member 1 |
| 19665 | 472 | AF022819 | D, L | potassium channel, subfamily K, member 1 | potassium channel, subfamily K, member 1 |
| 9027 | 218 | AA892312 | N | potassium inwardly-rectifying channel, subfamily J, member 16 | potassium inwardly-rectifying channel, subfamily J, member 16 |
| 14425 | 864 | AI177755 | M, L | pre-B-cell colony-enhancing factor | (pre-B-cell colony-enhancing factor, similar to Pre-B cell enhancing |
| | | | | | factor precursor) |
| 5208 | 1016 | AI236754 | G | pregnancy-induced growth inhibitor | pregnancy-induced growth inhibitor |
| 2109 | 47 | AA817887 | N, G | profilin 1 | profilin 1 |
| 9067 | 657 | AI070087 | M | prolactin | prolactin |
| 24568 | 1211 | L48060 | M, B | prolactin receptor | prolactin receptor |
| 24567 | 1234 | M19304 | N, F | prolactin receptor | prolactin receptor |
| 24566 | 1296 | M74152 | B, F, L | prolactin receptor | prolactin receptor |
| 1422 | 450 | AB012759 | M, B, G, L | prolyl endopeptidase | prolyl endopeptidase |
| 503 | 1082 | D16443 | C | prostaglandin E receptor 3 (subtype EP3) | prostaglandin E receptor 3 (subtype EP3) |
| 13609 | 229 | AA892468 | M, H, I | protease, serine, 8 (prostasin) | protease, serine, 8 (prostasin) |
| 13610 | 229 | AA892468 | M, A, C, F, H, I, K | protease, serine, 8 (prostasin) | protease, serine, 8 (prostasin) |
| 13611 | 879 | AI179378 | M, F, H | protease, serine, 8 (prostasin) | protease, serine, 8 (prostasin) |
| 1884 | 1109 | D50695 | I | proteasome (prosome, macropain) 26S subunit, ATPase, 4 | proteasome (prosome, macropain) 26S subunit, ATPase, 4 |
| 15470 | 1466 | U57050 | H | proteasome (prosome, macropain) 26S subunit, non-ATPase, 1 | proteasome (prosome, macropain) 26S subunit, non-ATPase, 1 |
| 4003 | 1071 | D10757 | N | proteasome (prosome, macropain) subunit, beta type, 9 (large | proteasome (prosome, macropain) subunit, beta type, 9 (large |
| | | | | multifunctional protease 2) | multifunctional protease 2) |
| 24563 | 1167 | J05592 | N, G, K | protein phosphatase 1, regulatory (inhibitor) subunit 1A | protein phosphatase 1, regulatory (inhibitor) subunit 1A |
| 24564 | 1167 | J05592 | N, G, K | protein phosphatase 1, regulatory (inhibitor) subunit 1A | protein phosphatase 1, regulatory (inhibitor) subunit 1A |
| 21491 | 486 | AF040954 | B | protein phosphatase 1, regulatory subunit 10 | protein phosphatase 1, regulatory subunit 10 |
| 1824 | 1427 | U17971 | K | protein tyrosine phosphatase, non-receptor type 21 | protein tyrosine phosphatase, non-receptor type 21 |
| 24438 | 1311 | M85183 | M, N, F, L | PYRIN-containing APAF1-like protein 5 | PYRIN-containing APAF1-like protein 5 |
| 1478 | 1447 | U32314 | M | pyruvate carboxylase | pyruvate carboxylase |
| 1479 | 1447 | U32314 | N, D | pyruvate carboxylase | pyruvate carboxylase |
| 23362 | 537 | AI009605 | N | Ras homolog enriched in brain | Ras homolog enriched in brain 2 |
| 4661 | 296 | AA899709 | M, B, L | receptor (calcitonin) activity modifying protein 3 | receptor (calcitonin) activity modifying protein 3 |
| 1515 | 1064 | D10233 | J | renin binding protein | renin binding protein |
| 21575 | 1544 | X55298 | J | ribophorin II | ribophorin II |
| 18107 | 1594 | X94242 | N | ribosomal protein L14 | ribosomal protein L14 |
| 5667 | 1553 | X58200 | N | ribosomal protein L23 | |
| 18611 | 1553 | X58200 | N | ribosomal protein L23 | |
| 15135 | 1382 | S71021 | N, G | ribosomal protein L6 | ribosomal protein L6 |
| 10878 | 1174 | K03250 | N | ribosomal protein S11 | ribosomal protein S11 |
| 20872 | 1534 | X51707 | N | ribosomal protein S19 | |
| 15653 | 1518 | X14210 | N, G | ribosomal protein S4, X-linked | |
| 16394 | 524 | AI008106 | K | S100 calcium binding protein A6 (calcyclin) | S100 calcium binding protein A6 (calcyclin) |
| 4280 | 922 | AI230247 | F | selenoprotein P, plasma, 1 | selenoprotein P, plasma, 1 |
| 699 | 1463 | U55765 | E | serine (or cysteine) proteinase inhibitor, clade A (alpha-1 | (hypothetical protein MGC25863, serine (or cysteine) proteinase |
| | | | | antiproteinase, antitrypsin), member 10 | inhibitor, clade A (alpha-1 antiproteinase, antitrypsin), member 10) |
| 24778 | 1515 | X13119 | N | serine dehydratase | serine dehydratase |
| 4198 | 1305 | M83143 | M, N, I | sialyltransferase 1 (beta-galactoside alpha-2,6-sialyltransferase) | sialyltransferase 1 (beta-galactoside alpha-2,6-sialyltransferase) |
| 4199 | 1305 | M83143 | M, N | sialyltransferase 1 (beta-galactoside alpha-2,6-sialyltransferase) | sialyltransferase 1 (beta-galactoside alpha-2,6-sialyltransferase) |
| 17500 | 243 | AA892616 | N | solute carrier family 13 (sodium-dependent dicarboxylate | solute carrier family 13 (sodium-dependent dicarboxylate |
| | | | | transporter), member 3 | transporter), member 3 |
| 235 | 1344 | NM_019347 | C | solute carrier family 14 (urea transporter), member 2 | solute carrier family 14 (urea transporter), member 2 |
| 15039 | 951 | AI232096 | M, F, I | solute carrier family 15 (H+/peptide transporter), member 2 | solute carrier family 15 (H+/peptide transporter), member 2 |
| 725 | 1471 | U62316 | B | solute carrier family 16 (monocarboxylic acid transporters), | solute carrier family 16 (monocarboxylic acid transporters), member 7 |
| | | | | member 7 | |
| 15872 | 1201 | L28135 | N | solute carrier family 2 (facilitated glucose transporter), member 2 | solute carrier family 2 (facilitated glucose transporter), member 2 |
| 1510 | 440 | AB004559 | M, D, K | solute carrier family 22 (organic anion transporter), member 6 | solute carrier family 22 (organic anion transporter), member 6 |
| 12682 | 797 | AI169656 | D | solute carrier family 22 (organic anion transporter), member 8 | solute carrier family 22 (organic anion transporter), member 8 |
| 1602 | 1483 | U76379 | N | solute carrier family 22 (organic cation transporter), member 1 | solute carrier family 22 (organic cation transporter), member 1 |
| 770 | 1112 | D83044 | M, N | solute carrier family 22 (organic cation transporter), member 2 | solute carrier family 22 (organic cation transporter), member 2 |
| 23625 | 458 | AB017260 | N, D | solute carrier family 22 (organic cation transporter), member 5 | solute carrier family 22 (organic cation transporter), member 5 |
| 43 | 1194 | L23413 | N | solute carrier family 26 (sulfate transporter), member 1 | solute carrier family 26 (sulfate transporter), member 1 |
| 17554 | 1115 | D85100 | N | solute carrier family 27 (fatty acid transporter), member 2 | solute carrier family 27 (fatty acid transporter), member 2 |
| 18074 | 469 | AF015305 | K | solute carrier family 29 (nucleoside transporters), member 2 | solute carrier family 29 (nucleoside transporters), member 2 |
| 6416 | 984 | AI234295 | M, K | solute carrier family 34 (sodium phosphate), member 2 | solute carrier family 34 (sodium phosphate), member 2 |
| 20780 | 1444 | U29881 | M, N, D | solute carrier family 5 (sodium/glucose cotransporter), member 2 | solute carrier family 5 (sodium/glucose cotransporter), member 2 |
| 7700 | 744 | AI105383 | M, D | sphingosine kinase 1 | sphingosine kinase 1 |
| 8426 | 483 | AF036335 | N, E, F | splicing factor proline/glutamine rich (polypyrimidine tract binding | splicing factor proline/glutamine rich (polypyrimidine tract binding |
| | | | | protein associated) | protein associated) |
| 16681 | 1095 | D37920 | N, B, L | squalene epoxidase | squalene epoxidase |
| 21842 | 828 | AI172293 | N | sterol-C4-methyl oxidase-like | sterol-C4-methyl oxidase-like |
| 14970 | 180 | AA891738 | M, B, H, I, K | sulfite oxidase | sulfite oxidase |
| 11692 | 1027 | AI638982 | M, N | sulfotransferase family, cytosolic, 1C, member 1 | sulfotransferase family, cytosolic, 1C, member 1 |
| 495 | 1573 | X68041 | J | superoxide dismutase 3, extracellular | superoxide dismutase 3, extracellular |
| 494 | 1610 | Z24721 | J | superoxide dismutase 3, extracellular | superoxide dismutase 3, extracellular |
| 21025 | 111 | AA859241 | M, A, C | synaptojanin 2 binding protein | synaptojanin 2 binding protein |
| 21024 | 1348 | NM_022599 | M | synaptojanin 2 binding protein | synaptojanin 2 binding protein |
| 15247 | 606 | AI014169 | N | thioredoxin interacting protein | thioredoxin interacting protein |
| 20816 | 1276 | M58404 | M, G, K | thymosin, beta 10 | thymosin, beta 10 |
| 7888 | 976 | AI233583 | M | tissue inhibitor of metalloproteinase 2 | tissue inhibitor of metalloproteinase 2 |
| 17149 | 1304 | M83107 | N | transgelin | transgelin |
| 17150 | 1304 | M83107 | N | transgelin | transgelin |
| 17550 | 565 | AI011607 | M, I | trimethyllysine hydroxylase, epsilon | trimethyllysine hydroxylase, epsilon |
| 14332 | 1051 | AJ001044 | D | tumor-associated calcium signal transducer 1 | tumor-associated calcium signal transducer 1 |
| 16683 | 1086 | D17445 | N | tyrosine 3-monooxygenase/tryptophan 5-monooxygenase | tyrosine 3-monooxygenase/tryptophan 5-monooxygenase activation |
| | | | | activation protein, eta polypeptide | protein, eta polypeptide |
| 16684 | 1086 | D17445 | M | tyrosine 3-monooxygenase/tryptophan 5-monooxygenase | tyrosine 3-monooxygenase/tryptophan 5-monooxygenase activation |
| | | | | activation protein, eta polypeptide | protein, eta polypeptide |
| 3016 | 50 | AA818069 | H | ubiquitin B | ubiquitin B |
| 3015 | 1084 | D16554 | A | ubiquitin B | ubiquitin B |
| 11843 | 494 | AF054826 | A | vesicle-associated membrane protein 5 (myobrevin) | vesicle-associated membrane protein 5 (myobrevin) |
| 15185 | 1568 | X62952 | M | vimentin | vimentin |
| 15008 | 485 | AF038591 | E | X-prolyl aminopepidase (aminopeptidase P) 1, soluble | X-prolyl aminopeptidase (aminopeptidase P) 1, soluble |
| 12331 | 370 | AA946466 | M, H | X-prolyl aminopeptidase (aminopepidase P) 2, membrane- | X-prolyl aminopeptidase (aminopeptidase P) 2, membrane-bound |
| | | | | bound | |
| 12332 | 370 | AA946466 | M, G | X-prolyl aminopeptidase (aminopeptidase P) 2, membrane- | X-prolyl aminopeptidase (aminopeptidase P) 2, membrane-bound |
| | | | | bound | |
| 1410 | 1330 | M96548 | H | zinc finger protein 354A | zinc finger protein 354A |
| 22501 | 351 | AA944811 | H | zinc finger, DHHC domain containing 7 | zinc finger, DHHC domain containing 7 |
| 22502 | 608 | AI029017 | H | zinc finger, DHHC domain containing 7 | zinc finger, DHHC domain containing 7 |

[0271] TABLE 4

| GLGC Model | GLGC Model Code | Table No. |
|---|---|---|
| General Nephrotoxicity | M (GENERAL1)* | 5M |
| General Nephrotoxicity | N (GENERAL2)** | 5N |
| Chloroform | A | 5A |
| Diclofenac | B | 5B |
| Menadione | C | 5C |
| SodiumChromate | D | 5D |
| SodiumOxalate | E | 5E |
| Thioacetamide | F | 5F |
| Vancomycin | G | 5G |
| proximal tubule S2 segment toxicity | H | 5H |
| Tubular Toxicity | I | 5I |
| Glomerular Injury | J | 5J |
| Tubular Obstruction | K | 5K |
| NSAIDS | L | 5L |

*MAS4 LDA Based
**RMA PLS Based

[0272] TABLE 5A

| GLGC | LDA | Tox Group | Tox Group | Non-Tox | Non-Tox |
|---|---|---|---|---|---|
| Identifier | Score | Mean | SD | Group Mean | Group SD |
| 3091 | 95.09 | 421.64 | 58.81 | 713.53 | 158.43 |
| 4462 | 93.09 | 414.41 | 198.64 | 953.78 | 313.55 |
| 22648 | 92.73 | 313.31 | 70.15 | 490.37 | 101.26 |
| 13610 | 92.33 | 226.14 | 59.71 | 365.06 | 107.29 |
| 21025 | 92.15 | 233.83 | 71.17 | 418.06 | 106.83 |
| 3961 | 91.61 | 74.40 | 10.55 | 49.45 | 14.81 |
| 2912 | 90.89 | 1436.37 | 179.76 | 2437.60 | 603.29 |
| 17361 | 90.70 | 50.93 | 20.08 | 137.86 | 55.93 |
| 23509 | 89.88 | 1570.55 | 137.71 | 2086.99 | 379.49 |
| 13028 | 89.85 | 137.00 | 17.66 | 89.57 | 32.90 |
| 20725 | 88.97 | 621.86 | 57.64 | 801.80 | 141.09 |
| 11953 | 88.88 | 1079.47 | 146.45 | 1693.94 | 588.62 |
| 1652 | 88.73 | 476.16 | 64.04 | 656.76 | 161.47 |
| 4463 | 88.62 | 43.16 | 34.48 | 150.98 | 58.66 |
| 25643 | 88.48 | 187.37 | 74.36 | 110.76 | 25.22 |
| 3875 | 88.29 | 252.35 | 75.16 | 478.18 | 126.13 |
| 16469 | 88.06 | 991.10 | 103.75 | 1321.05 | 271.57 |
| 1650 | 87.97 | 569.84 | 94.38 | 790.48 | 182.69 |
| 8829 | 87.88 | 505.66 | 151.99 | 282.86 | 84.70 |
| 23282 | 87.61 | 425.15 | 71.15 | 283.98 | 52.36 |
| 9191 | 87.55 | 277.28 | 132.99 | 657.06 | 277.10 |
| 13727 | 87.53 | 35.36 | 28.82 | 109.18 | 42.58 |
| 15032 | 87.42 | 175.94 | 47.04 | 265.22 | 74.56 |
| 2059 | 87.30 | 219.06 | 65.06 | 136.38 | 34.61 |
| 21088 | 87.30 | 56.92 | 8.06 | 40.35 | 14.32 |
| 18522 | 87.29 | 490.66 | 94.81 | 759.01 | 194.27 |
| 21977 | 87.24 | 38.53 | 11.16 | 77.01 | 45.15 |
| 11653 | 87.24 | 306.58 | 112.65 | 560.40 | 195.77 |
| 23033 | 87.21 | 431.39 | 57.07 | 579.07 | 117.99 |
| 19822 | 86.82 | 994.53 | 147.26 | 1418.54 | 381.93 |
| 9176 | 86.73 | 288.61 | 15.81 | 245.52 | 51.27 |
| 17524 | 86.71 | 799.10 | 105.47 | 1115.60 | 282.08 |
| 7216 | 86.71 | 123.29 | 34.23 | 234.44 | 71.10 |
| 11761 | 86.64 | 49.48 | 6.15 | 68.95 | 26.33 |
| 4473 | 86.50 | 95.76 | 32.22 | 172.47 | 49.25 |
| 3925 | 86.50 | 275.69 | 80.34 | 461.73 | 112.55 |
| 14856 | 86.45 | 330.60 | 53.33 | 438.34 | 100.70 |
| 2439 | 86.44 | 102.63 | 17.35 | 147.69 | 27.96 |
| 22490 | 86.42 | 811.57 | 139.35 | 602.93 | 96.00 |
| 14267 | 86.42 | 1171.51 | 258.92 | 1706.75 | 393.91 |
| 8927 | 86.42 | 508.53 | 79.40 | 689.86 | 154.77 |
| 8946 | 86.39 | 112.12 | 21.59 | 186.07 | 74.49 |
| 4178 | 86.29 | 444.39 | 54.78 | 619.34 | 136.02 |
| 23115 | 86.26 | 278.57 | 65.22 | 503.85 | 159.60 |
| 16958 | 86.15 | 61.46 | 19.84 | 30.96 | 13.91 |
| 9116 | 86.14 | 269.31 | 52.99 | 392.85 | 75.60 |
| 15836 | 86.00 | 121.07 | 16.96 | 214.57 | 101.58 |
| 13285 | 85.94 | 110.31 | 17.04 | 71.38 | 16.98 |
| 5369 | 85.88 | 274.28 | 47.68 | 200.95 | 43.34 |
| 8721 | 85.83 | 73.87 | 43.04 | 183.86 | 66.21 |
| 3803 | 85.73 | 975.63 | 205.56 | 722.11 | 154.02 |
| 1409 | 85.68 | 298.20 | 49.00 | 438.84 | 99.15 |
| 17824 | 85.62 | 205.14 | 27.09 | 142.57 | 42.17 |
| 7299 | 85.42 | 334.53 | 109.96 | 181.79 | 143.50 |
| 1653 | 85.35 | 686.13 | 93.92 | 993.47 | 242.55 |
| 17516 | 85.33 | 500.55 | 239.88 | 547.02 | 127.42 |
| 19377 | 85.21 | 155.74 | 30.08 | 109.47 | 24.61 |
| 1570 | 85.17 | 98.50 | 59.57 | 39.00 | 13.49 |
| 1651 | 85.17 | 577.75 | 69.32 | 788.50 | 180.99 |
| 7622 | 85.09 | 88.74 | 20.90 | 56.95 | 16.90 |
| 22855 | 85.05 | 373.13 | 49.91 | 519.30 | 117.46 |
| 21562 | 85.05 | 265.87 | 68.99 | 468.38 | 147.67 |
| 4933 | 84.98 | 743.88 | 516.81 | 142.53 | 232.49 |
| 15964 | 84.88 | 583.51 | 205.70 | 1089.69 | 286.46 |
| 24234 | 84.86 | 408.25 | 208.57 | 188.66 | 107.50 |
| 7634 | 84.86 | 538.91 | 181.95 | 645.21 | 126.88 |
| 12129 | 84.85 | 245.65 | 111.61 | 646.79 | 334.57 |
| 25777 | 84.83 | 1173.74 | 710.54 | 439.45 | 241.72 |
| 10378 | 84.82 | 69.21 | 33.23 | 143.74 | 101.86 |
| 1581 | 84.77 | 87.66 | 15.15 | 66.76 | 21.00 |
| 20582 | 84.74 | 347.72 | 63.49 | 487.44 | 95.49 |
| 20000 | 84.67 | 93.69 | 19.60 | 127.60 | 71.39 |
| 13740 | 84.64 | 257.51 | 18.03 | 221.70 | 39.96 |
| 16756 | 84.59 | 361.18 | 150.11 | 171.51 | 41.28 |
| 26183 | 84.58 | 64.68 | 11.03 | 47.22 | 22.02 |
| 22985 | 84.55 | 83.55 | 9.87 | 108.90 | 29.86 |
| 23718 | 84.42 | 65.41 | 10.03 | 97.59 | 40.96 |
| 10130 | 84.36 | 117.70 | 66.31 | 221.33 | 55.16 |
| 17541 | 84.35 | 1464.81 | 514.58 | 725.03 | 344.90 |
| 21060 | 84.30 | 133.69 | 25.56 | 83.14 | 27.48 |
| 16468 | 84.29 | 831.97 | 118.43 | 1136.11 | 219.87 |
| 20741 | 84.26 | 236.26 | 31.17 | 175.32 | 43.96 |
| 6641 | 84.21 | 233.86 | 84.82 | 396.94 | 88.30 |
| 22537 | 84.18 | 145.19 | 78.83 | 301.55 | 137.94 |
| 18509 | 83.95 | 311.54 | 43.78 | 430.03 | 88.77 |
| 19110 | 83.92 | 84.32 | 32.08 | 204.53 | 96.17 |
| 11843 | 83.88 | 61.43 | 4.65 | 52.11 | 10.69 |
| 15800 | 83.74 | 56.84 | 10.37 | 34.45 | 19.58 |
| 7936 | 83.74 | 93.98 | 18.72 | 137.68 | 31.48 |
| 22783 | 83.67 | 473.86 | 73.76 | 347.89 | 212.99 |
| 20832 | 83.65 | 534.47 | 85.79 | 785.26 | 199.66 |
| 1949 | 83.61 | 57.75 | 7.72 | 90.12 | 37.12 |
| 21061 | 83.52 | 86.99 | 17.50 | 50.51 | 22.34 |
| 25168 | 83.29 | 32.68 | 2.87 | 23.16 | 9.80 |
| 6127 | 83.24 | 41.36 | 8.04 | 64.30 | 27.81 |
| 19679 | 83.24 | 440.67 | 183.93 | 755.52 | 202.10 |
| 15701 | 83.20 | 63.42 | 22.84 | 30.93 | 12.46 |
| 20896 | 83.09 | 106.66 | 65.89 | 141.12 | 40.19 |
| 13646 | 82.98 | 1169.38 | 295.87 | 817.10 | 184.73 |
| 6343 | 82.92 | 46.79 | 4.81 | 34.28 | 11.62 |
| 1877 | 82.89 | 444.75 | 101.68 | 652.86 | 170.37 |
| 24437 | 82.76 | 56.38 | 5.77 | 61.94 | 29.69 |
| 16948 | 82.71 | 145.85 | 69.01 | 317.13 | 132.79 |
| 825 | 82.62 | 22.20 | 8.99 | 46.45 | 18.16 |
| 25862 | 82.39 | 38.61 | 8.30 | 23.01 | 10.20 |
| 1143 | 82.38 | 131.83 | 21.57 | 92.25 | 32.27 |
| 20708 | 82.38 | 80.85 | 9.57 | 61.19 | 17.28 |
| 20833 | 82.32 | 1010.33 | 178.76 | 1449.79 | 326.39 |
| 19144 | 82.32 | 36.63 | 8.07 | 25.15 | 10.80 |
| 2632 | 82.26 | 190.41 | 17.08 | 153.91 | 30.61 |
| 1644 | 82.23 | 418.83 | 62.93 | 560.68 | 126.32 |
| 3015 | 82.18 | 2837.91 | 186.68 | 2819.00 | 1012.99 |
| 7505 | 81.98 | 274.29 | 43.54 | 384.55 | 118.76 |
| 1509 | 81.62 | 431.65 | 81.24 | 550.73 | 118.16 |
| 25921 | 81.56 | 47.30 | 10.74 | 28.36 | 16.07 |
| 1460 | 81.41 | 281.25 | 87.21 | 192.24 | 83.91 |
| 1929 | 81.33 | 536.97 | 208.01 | 870.13 | 215.86 |
| 9905 | 81.30 | 538.90 | 116.34 | 744.96 | 153.52 |
| 15072 | 81.24 | 42.04 | 6.55 | 31.15 | 15.09 |

[0273] TABLE 5B

| GLGC | LDA | Tox Group | Tox Group | Non-Tox | Non-Tox |
|---|---|---|---|---|---|
| Identifier | Score | Mean | SD | Group Mean | Group SD |
| 7540 | 97.91 | 504.78 | 145.39 | 158.51 | 83.92 |
| 8820 | 97.91 | 743.55 | 284.97 | 139.15 | 119.88 |
| 7299 | 97.61 | 595.57 | 144.70 | 180.65 | 140.60 |
| 5920 | 97.46 | 1412.80 | 271.66 | 635.94 | 191.82 |
| 24200 | 97.01 | 885.64 | 139.99 | 426.56 | 138.77 |
| 17805 | 96.58 | 1504.75 | 444.21 | 682.13 | 328.81 |
| 4661 | 96.19 | 555.94 | 110.43 | 307.06 | 85.59 |
| 15964 | 95.49 | 487.88 | 126.89 | 1089.29 | 286.36 |
| 24197 | 95.31 | 82.06 | 26.90 | 235.59 | 79.78 |
| 15411 | 94.83 | 552.53 | 112.91 | 304.39 | 94.23 |
| 8065 | 94.80 | 236.57 | 31.67 | 163.82 | 37.32 |
| 21977 | 94.77 | 30.72 | 6.14 | 76.98 | 45.11 |
| 725 | 94.04 | 33.60 | 10.05 | 110.06 | 46.60 |
| 14450 | 93.98 | 45.80 | 9.30 | 146.93 | 73.46 |
| 7936 | 93.59 | 82.66 | 12.40 | 137.66 | 31.43 |
| 4330 | 93.19 | 242.18 | 59.53 | 461.51 | 139.37 |
| 21012 | 92.66 | 445.05 | 162.22 | 203.66 | 116.06 |
| 6046 | 92.65 | 83.37 | 33.70 | 193.87 | 62.20 |
| 3465 | 92.50 | 152.39 | 23.63 | 263.07 | 79.12 |
| 15017 | 92.48 | 2241.27 | 415.11 | 1149.81 | 399.55 |
| 7872 | 92.44 | 63.92 | 8.33 | 112.60 | 35.96 |
| 21014 | 92.42 | 352.43 | 145.68 | 149.67 | 82.43 |
| 19067 | 92.38 | 76.83 | 28.49 | 162.21 | 46.61 |
| 8234 | 92.38 | 22.24 | 6.70 | 47.07 | 15.98 |
| 5461 | 91.99 | 694.84 | 296.55 | 199.69 | 117.96 |
| 22311 | 91.96 | 1255.02 | 184.06 | 688.00 | 158.37 |
| 17541 | 91.84 | 1839.84 | 669.37 | 724.33 | 339.91 |
| 16982 | 91.81 | 1036.49 | 606.21 | 130.48 | 296.12 |
| 7937 | 91.71 | 34.46 | 21.21 | 176.64 | 93.91 |
| 15679 | 91.36 | 309.12 | 62.83 | 174.14 | 47.36 |
| 15125 | 91.33 | 3102.06 | 1017.25 | 1525.20 | 405.25 |
| 665 | 91.27 | 849.30 | 217.79 | 538.96 | 94.94 |
| 6278 | 91.08 | 58.48 | 10.10 | 94.99 | 25.06 |
| 14970 | 90.99 | 134.42 | 36.31 | 199.60 | 41.02 |
| 3172 | 90.74 | 36.28 | 40.56 | 206.90 | 111.79 |
| 8104 | 90.62 | 85.37 | 9.09 | 60.70 | 24.71 |
| 23151 | 90.62 | 204.97 | 55.56 | 355.14 | 101.19 |
| 14346 | 90.51 | 174.62 | 63.19 | 52.54 | 90.15 |
| 5930 | 90.51 | 73.85 | 24.31 | 26.85 | 19.94 |
| 1698 | 90.48 | 190.91 | 66.62 | 70.39 | 93.92 |
| 11755 | 90.42 | 343.83 | 127.98 | 144.25 | 136.11 |
| 6014 | 90.36 | 183.73 | 46.62 | 80.51 | 44.34 |
| 16898 | 90.26 | 55.03 | 10.77 | 78.17 | 16.44 |
| 14595 | 90.21 | 167.82 | 59.62 | 77.65 | 33.41 |
| 17401 | 90.15 | 1909.24 | 588.72 | 1010.74 | 422.89 |
| 10446 | 90.14 | 22.58 | 15.15 | 127.88 | 91.52 |
| 13614 | 90.06 | 497.29 | 91.75 | 324.46 | 71.36 |
| 15189 | 90.00 | 4842.58 | 1706.56 | 2020.75 | 1168.41 |
| 15035 | 89.99 | 23.84 | 16.64 | 124.98 | 68.66 |
| 13966 | 89.97 | 227.19 | 38.65 | 159.84 | 32.03 |
| 10434 | 89.97 | 77.07 | 35.03 | 33.65 | 20.30 |
| 1340 | 89.87 | 124.95 | 20.55 | 184.83 | 85.84 |
| 8850 | 89.82 | 175.34 | 58.83 | 99.07 | 34.66 |
| 16521 | 89.73 | 453.74 | 109.04 | 284.15 | 76.30 |
| 12921 | 89.73 | 213.56 | 56.93 | 102.59 | 48.69 |
| 13013 | 89.59 | 32.49 | 10.44 | 65.57 | 21.46 |
| 6758 | 89.57 | 59.84 | 19.18 | 28.92 | 13.70 |
| 22885 | 89.51 | 2441.02 | 725.57 | 1292.56 | 483.73 |
| 20831 | 89.50 | 55.62 | 17.29 | 138.12 | 57.86 |
| 21354 | 89.39 | 640.85 | 156.38 | 418.77 | 127.04 |
| 12979 | 89.39 | 742.50 | 248.93 | 366.97 | 196.56 |
| 11991 | 89.35 | 20.14 | 10.16 | 46.26 | 16.40 |
| 6796 | 89.30 | 304.75 | 71.31 | 192.78 | 51.24 |
| 21976 | 89.24 | 462.91 | 64.44 | 316.41 | 69.92 |
| 20523 | 89.18 | 1004.68 | 208.03 | 579.32 | 164.47 |
| 21975 | 89.03 | 357.73 | 79.92 | 212.58 | 62.99 |
| 9520 | 89.02 | 69.60 | 25.47 | 140.86 | 46.37 |
| 6917 | 88.81 | 111.53 | 14.34 | 176.04 | 69.10 |
| 8888 | 88.78 | 22.26 | 7.29 | 48.79 | 20.58 |
| 1527 | 88.63 | 51.23 | 9.78 | 88.23 | 39.31 |
| 22479 | 88.52 | 693.29 | 140.68 | 417.80 | 129.01 |
| 8099 | 88.52 | 72.23 | 24.65 | 43.64 | 14.56 |
| 12925 | 88.48 | 44.20 | 4.65 | 69.36 | 29.98 |
| 9079 | 88.46 | 1099.28 | 237.43 | 736.13 | 163.45 |
| 1858 | 88.43 | 253.42 | 73.25 | 153.78 | 50.88 |
| 26083 | 88.38 | 403.60 | 200.12 | 1199.39 | 721.99 |
| 8759 | 88.36 | 237.31 | 41.30 | 156.57 | 41.79 |
| 16520 | 87.97 | 174.46 | 63.58 | 88.91 | 110.98 |
| 24566 | 87.61 | 32.95 | 21.32 | 180.03 | 89.43 |
| 1422 | 87.45 | 174.39 | 46.71 | 300.07 | 105.44 |
| 20864 | 87.40 | 3112.64 | 637.13 | 1921.03 | 633.85 |
| 17088 | 87.37 | 98.27 | 17.79 | 58.55 | 31.41 |
| 25106 | 87.02 | 28.05 | 3.19 | 38.61 | 13.12 |
| 3439 | 86.94 | 135.79 | 26.09 | 92.94 | 24.52 |
| 20405 | 86.92 | 133.28 | 70.23 | 29.80 | 29.59 |
| 21145 | 86.79 | 76.23 | 47.54 | 200.42 | 66.53 |
| 2128 | 86.56 | 97.35 | 47.36 | 32.61 | 16.44 |
| 4449 | 86.33 | 156.15 | 44.78 | 243.11 | 70.20 |
| 24893 | 86.30 | 20.58 | 18.68 | 85.55 | 52.17 |
| 23987 | 86.20 | 596.80 | 251.48 | 276.13 | 75.22 |
| 11434 | 86.18 | 181.39 | 56.52 | 324.42 | 119.03 |
| 1847 | 86.15 | 22.26 | 10.03 | 62.17 | 36.21 |
| 20457 | 86.13 | 235.87 | 68.78 | 395.90 | 100.59 |
| 21491 | 86.07 | 67.51 | 10.34 | 100.55 | 23.55 |
| 24232 | 85.94 | 48.69 | 39.24 | 151.29 | 60.27 |
| 15379 | 85.72 | 33.32 | 11.21 | 67.90 | 28.41 |
| 16681 | 85.68 | 134.46 | 57.78 | 63.59 | 25.88 |
| 15761 | 85.67 | 22.22 | 16.23 | 77.85 | 34.65 |
| 13542 | 85.67 | 321.75 | 219.70 | 462.35 | 148.34 |
| 24568 | 85.63 | 78.30 | 23.68 | 153.33 | 67.67 |
| 1729 | 85.55 | 81.89 | 44.56 | 212.81 | 80.84 |
| 13485 | 85.51 | 38.32 | 7.99 | 57.48 | 16.43 |
| 67 | 85.37 | 1551.30 | 178.56 | 1151.89 | 254.88 |
| 6782 | 85.13 | 310.65 | 67.44 | 219.45 | 62.29 |
| 22321 | 85.13 | 138.89 | 29.75 | 94.97 | 68.63 |
| 15124 | 85.11 | 1897.22 | 536.70 | 1048.98 | 283.10 |
| 954 | 84.94 | 54.36 | 5.77 | 71.54 | 20.36 |
| 1894 | 84.89 | 294.35 | 70.10 | 198.20 | 72.90 |
| 1888 | 84.83 | 101.45 | 32.01 | 52.26 | 33.35 |
| 20682 | 84.77 | 226.38 | 89.62 | 409.19 | 108.15 |
| 18246 | 84.64 | 100.99 | 77.72 | 258.41 | 95.94 |
| 20000 | 84.61 | 24.08 | 20.83 | 127.92 | 70.97 |
| 11481 | 84.61 | 20.44 | 15.73 | 65.86 | 29.15 |
| 1529 | 84.43 | 194.31 | 45.08 | 294.86 | 70.18 |
| 14003 | 84.35 | 1575.92 | 414.94 | 932.50 | 241.80 |
| 18597 | 84.32 | 987.07 | 317.42 | 563.12 | 200.20 |
| 20803 | 84.29 | 737.50 | 199.95 | 473.34 | 124.77 |

[0274] TABLE 5C

| GLGC | LDA | Tox Group | Tox Group | Non-Tox | Non-Tox |
|---|---|---|---|---|---|
| Identifier | Score | Mean | SD | Group Mean | Group SD |
| 17734 | 98.79 | 321.98 | 49.82 | 114.29 | 102.66 |
| 18642 | 98.09 | 492.19 | 42.17 | 881.32 | 192.80 |
| 21388 | 97.24 | 104.79 | 11.52 | 27.72 | 24.11 |
| 16907 | 96.36 | 33.38 | 19.54 | 131.32 | 51.03 |
| 24042 | 95.76 | 73.75 | 40.11 | 21.09 | 79.30 |
| 22101 | 95.58 | 21.93 | 23.56 | 170.51 | 83.23 |
| 12343 | 95.55 | 89.32 | 12.94 | 50.29 | 16.25 |
| 16948 | 95.36 | 125.57 | 23.36 | 317.27 | 132.70 |
| 1141 | 95.33 | 394.51 | 55.69 | 241.23 | 66.76 |
| 8664 | 95.29 | 1388.21 | 550.83 | 89.50 | 215.23 |
| 7142 | 95.27 | 363.26 | 34.37 | 610.43 | 144.19 |
| 8665 | 95.26 | 2691.53 | 1101.20 | 343.63 | 497.74 |
| 1475 | 95.17 | 2063.49 | 658.77 | 155.80 | 379.29 |
| 16354 | 95.03 | 20.78 | 35.33 | 279.68 | 148.90 |
| 3863 | 94.79 | 122.87 | 17.81 | 196.59 | 86.02 |
| 12561 | 94.73 | 64.62 | 15.14 | 148.52 | 51.53 |
| 18288 | 94.67 | 217.71 | 34.85 | 124.55 | 43.60 |
| 21029 | 94.64 | 126.09 | 12.20 | 81.52 | 23.49 |
| 24649 | 94.42 | 65.78 | 19.06 | 112.21 | 22.95 |
| 1409 | 94.27 | 290.95 | 26.81 | 438.89 | 99.13 |
| 6290 | 94.18 | 167.05 | 14.13 | 232.79 | 37.78 |
| 17735 | 94.05 | 363.65 | 53.62 | 178.33 | 104.47 |
| 11618 | 94.03 | 224.46 | 33.16 | 380.82 | 110.84 |
| 14083 | 93.91 | 297.20 | 43.33 | 473.74 | 100.64 |
| 16518 | 93.89 | 2054.01 | 385.94 | 949.88 | 306.74 |
| 10004 | 93.55 | 78.40 | 13.45 | 39.38 | 19.65 |
| 3474 | 93.52 | 345.67 | 22.76 | 483.73 | 104.79 |
| 1764 | 93.42 | 138.74 | 17.01 | 88.17 | 27.95 |
| 17570 | 93.36 | 379.60 | 47.99 | 240.61 | 81.89 |
| 21672 | 93.27 | 447.28 | 37.64 | 314.18 | 77.63 |
| 23758 | 93.24 | 103.71 | 16.35 | 174.80 | 41.71 |
| 7586 | 93.24 | 455.38 | 78.29 | 769.55 | 187.42 |
| 809 | 93.23 | 100.66 | 16.68 | 39.56 | 39.66 |
| 17938 | 93.15 | 319.01 | 21.59 | 447.84 | 95.68 |
| 22412 | 93.08 | 196.70 | 39.42 | 91.13 | 45.28 |
| 11559 | 93.06 | 318.57 | 60.32 | 552.63 | 125.46 |
| 7300 | 93.06 | 545.82 | 63.96 | 744.66 | 285.54 |
| 22415 | 92.95 | 375.76 | 48.28 | 206.41 | 158.59 |
| 21400 | 92.85 | 211.40 | 61.58 | 361.76 | 72.81 |
| 20161 | 92.68 | 128.82 | 47.99 | 32.65 | 31.21 |
| 25547 | 92.64 | 407.00 | 28.91 | 267.96 | 104.45 |
| 9116 | 92.64 | 273.80 | 27.04 | 392.81 | 75.75 |
| 12551 | 92.58 | 95.87 | 15.38 | 164.16 | 42.22 |
| 3091 | 92.52 | 531.24 | 38.99 | 712.74 | 159.66 |
| 5565 | 92.52 | 206.09 | 47.75 | 389.83 | 117.52 |
| 21990 | 92.48 | 28.82 | 20.42 | 121.58 | 57.45 |
| 25606 | 92.45 | 66.28 | 8.55 | 40.17 | 15.01 |
| 16003 | 92.45 | 198.48 | 23.57 | 334.94 | 104.96 |
| 7049 | 92.42 | 153.66 | 20.90 | 227.04 | 46.15 |
| 18350 | 92.35 | 276.28 | 122.54 | 92.32 | 51.93 |
| 503 | 92.18 | 150.85 | 14.24 | 103.15 | 29.15 |
| 20173 | 92.18 | 32.74 | 11.51 | 77.29 | 31.95 |
| 17755 | 92.18 | 246.88 | 32.61 | 383.76 | 97.58 |
| 1460 | 92.12 | 251.67 | 29.18 | 192.46 | 84.37 |
| 24672 | 92.12 | 65.39 | 7.99 | 39.44 | 14.11 |
| 10667 | 92.09 | 94.44 | 15.07 | 38.95 | 41.37 |
| 6632 | 92.08 | 270.94 | 30.65 | 167.71 | 54.30 |
| 6736 | 92.06 | 131.85 | 22.79 | 69.09 | 33.18 |
| 6675 | 92.06 | 362.12 | 33.19 | 548.28 | 144.52 |
| 19768 | 92.02 | 1218.83 | 166.71 | 787.22 | 172.80 |
| 3698 | 91.97 | 66.85 | 13.21 | 128.16 | 41.97 |
| 9583 | 91.92 | 154.31 | 44.35 | 55.84 | 61.67 |
| 7936 | 91.91 | 84.99 | 15.68 | 137.74 | 31.39 |
| 6595 | 91.85 | 109.39 | 17.61 | 68.80 | 30.49 |
| 1581 | 91.79 | 87.16 | 7.56 | 66.76 | 21.04 |
| 2824 | 91.79 | 65.68 | 9.52 | 100.88 | 21.89 |
| 19040 | 91.74 | 323.49 | 86.16 | 184.44 | 121.72 |
| 23834 | 91.74 | 142.01 | 30.15 | 74.82 | 24.22 |
| 23033 | 91.64 | 422.53 | 36.80 | 579.14 | 117.96 |
| 21025 | 91.61 | 267.66 | 41.37 | 417.82 | 107.31 |
| 4952 | 91.59 | 200.30 | 34.51 | 106.14 | 44.92 |
| 21211 | 91.55 | 548.25 | 69.20 | 850.78 | 217.13 |
| 22413 | 91.53 | 141.51 | 32.80 | 68.54 | 38.43 |
| 8837 | 91.52 | 234.73 | 29.31 | 331.74 | 63.42 |
| 21653 | 91.50 | 363.77 | 66.02 | 237.45 | 68.10 |
| 4462 | 91.48 | 567.85 | 100.01 | 952.66 | 315.50 |
| 12450 | 91.48 | 35.96 | 20.64 | 127.75 | 69.86 |
| 11162 | 91.45 | 324.91 | 48.59 | 495.59 | 118.35 |
| 2555 | 91.44 | 145.97 | 22.76 | 85.01 | 42.88 |
| 605 | 91.39 | 38.02 | 5.26 | 21.20 | 10.90 |
| 15138 | 91.39 | 196.35 | 69.14 | 471.14 | 175.95 |
| 25379 | 91.38 | 117.64 | 16.80 | 71.75 | 25.39 |
| 235 | 91.30 | 320.65 | 25.66 | 230.34 | 61.53 |
| 1929 | 91.29 | 473.25 | 68.26 | 870.59 | 215.67 |
| 17256 | 91.27 | 259.66 | 52.16 | 429.33 | 122.40 |
| 24459 | 91.21 | 398.68 | 40.21 | 276.39 | 76.14 |
| 13610 | 91.17 | 219.12 | 31.55 | 365.11 | 107.30 |
| 35 | 91.15 | 784.74 | 75.75 | 1207.71 | 355.24 |
| 12016 | 91.15 | 252.53 | 37.75 | 465.80 | 181.24 |
| 21683 | 91.05 | 65.76 | 22.22 | 27.27 | 20.99 |
| 1501 | 91.02 | 99.81 | 25.56 | 52.93 | 56.99 |
| 25747 | 90.98 | 80.78 | 19.33 | 42.91 | 38.40 |
| 23166 | 90.98 | 229.86 | 42.08 | 126.92 | 62.06 |
| 25279 | 90.97 | 751.86 | 61.65 | 549.26 | 116.47 |
| 9224 | 90.94 | 418.49 | 23.57 | 559.20 | 140.71 |
| 4542 | 90.94 | 270.11 | 21.67 | 180.81 | 56.07 |
| 21696 | 90.92 | 282.32 | 32.07 | 175.33 | 47.74 |
| 20753 | 90.89 | 184.62 | 20.62 | 119.99 | 28.26 |
| 433 | 90.88 | 134.41 | 23.78 | 80.86 | 34.13 |
| 19251 | 90.88 | 562.71 | 31.16 | 694.44 | 105.77 |
| 16469 | 90.82 | 1028.80 | 54.62 | 1320.78 | 271.98 |
| 15791 | 90.79 | 201.52 | 56.18 | 123.78 | 84.57 |
| 17226 | 90.79 | 433.99 | 33.61 | 577.07 | 118.33 |
| 15421 | 90.70 | 562.11 | 32.28 | 738.52 | 153.62 |
| 20085 | 90.68 | 375.42 | 39.17 | 247.93 | 59.19 |
| 407 | 90.64 | 264.48 | 35.26 | 395.09 | 94.07 |
| 17426 | 90.61 | 429.40 | 38.59 | 568.65 | 91.40 |
| 2098 | 90.58 | 232.32 | 22.55 | 177.21 | 39.37 |
| 13005 | 90.56 | 143.19 | 30.68 | 80.63 | 29.18 |
| 25098 | 90.52 | 176.46 | 75.02 | 35.80 | 33.18 |
| 10241 | 90.38 | 114.02 | 25.12 | 59.17 | 24.28 |
| 23679 | 90.38 | 78.01 | 14.28 | 38.29 | 19.90 |
| 16520 | 90.36 | 123.97 | 17.89 | 89.12 | 111.29 |

[0275] TABLE 5D

| GLGC | LDA | Tox Group | Tox Group | Non-Tox | Non-Tox |
|---|---|---|---|---|---|
| Identifier | Score | Mean | SD | Group Mean | Group SD |
| 15291 | 97.74 | 227.69 | 93.17 | 97.65 | 27.73 |
| 7896 | 97.71 | 173.75 | 8.10 | 283.20 | 65.35 |
| 3631 | 97.59 | 146.49 | 9.89 | 93.75 | 22.59 |
| 2232 | 97.16 | 36.74 | 0.82 | 24.79 | 11.77 |
| 23626 | 97.10 | 201.76 | 49.28 | 78.54 | 37.73 |
| 24762 | 97.07 | 206.67 | 49.31 | 926.38 | 314.75 |
| 3493 | 96.95 | 123.15 | 24.99 | 61.58 | 18.38 |
| 16625 | 96.89 | 237.89 | 5.08 | 180.96 | 38.01 |
| 11959 | 96.86 | 62.25 | 10.64 | 125.40 | 27.59 |
| 15027 | 96.86 | 228.67 | 10.97 | 139.90 | 39.67 |
| 16338 | 96.77 | 97.00 | 8.89 | 58.64 | 16.37 |
| 5901 | 96.74 | 159.91 | 19.26 | 91.66 | 42.91 |
| 2423 | 96.59 | 192.07 | 14.10 | 132.98 | 27.14 |
| 12797 | 96.56 | 166.69 | 40.58 | 73.77 | 27.51 |
| 11558 | 96.56 | 70.08 | 17.91 | 160.77 | 43.05 |
| 2534 | 96.56 | 68.06 | 11.48 | 35.59 | 11.40 |
| 23790 | 96.53 | 123.00 | 38.12 | 63.08 | 19.14 |
| 16859 | 96.50 | 245.89 | 56.54 | 122.60 | 47.46 |
| 23698 | 96.41 | 147.28 | 9.50 | 275.19 | 124.72 |
| 16824 | 96.41 | 72.56 | 17.91 | 227.30 | 79.50 |
| 17223 | 96.41 | 1104.50 | 35.58 | 868.15 | 118.29 |
| 2113 | 96.38 | 222.44 | 37.93 | 132.53 | 29.47 |
| 18418 | 96.35 | 370.51 | 71.34 | 245.92 | 41.02 |
| 23843 | 96.32 | 187.45 | 30.50 | 103.55 | 28.14 |
| 21659 | 96.32 | 386.36 | 74.64 | 204.80 | 61.71 |
| 22538 | 96.29 | 172.72 | 15.27 | 339.80 | 93.47 |
| 12129 | 96.29 | 143.53 | 31.03 | 645.40 | 334.58 |
| 15232 | 96.26 | 257.50 | 24.61 | 169.53 | 35.85 |
| 17523 | 96.17 | 123.97 | 10.52 | 81.13 | 19.15 |
| 5290 | 96.17 | 22.52 | 4.12 | 50.65 | 15.13 |
| 19152 | 96.14 | 320.13 | 96.93 | 160.67 | 53.93 |
| 22180 | 96.14 | 145.82 | 40.45 | 88.52 | 23.95 |
| 8721 | 96.14 | 35.66 | 23.53 | 183.51 | 66.31 |
| 19412 | 96.11 | 219.32 | 2.99 | 183.37 | 50.07 |
| 7700 | 96.11 | 135.98 | 23.23 | 80.56 | 43.28 |
| 24592 | 96.05 | 74.35 | 27.61 | 329.43 | 142.17 |
| 23018 | 96.05 | 150.06 | 18.94 | 105.15 | 19.40 |
| 7270 | 96.02 | 267.75 | 28.36 | 171.64 | 36.71 |
| 15159 | 96.02 | 419.08 | 74.41 | 872.31 | 214.06 |
| 22770 | 95.99 | 460.91 | 61.30 | 293.34 | 60.75 |
| 13106 | 95.99 | 68.92 | 9.31 | 37.20 | 21.98 |
| 22537 | 95.96 | 40.88 | 34.27 | 301.20 | 137.68 |
| 14332 | 95.90 | 951.74 | 99.04 | 604.90 | 155.26 |
| 17419 | 95.90 | 336.07 | 70.94 | 197.65 | 45.14 |
| 17468 | 95.87 | 240.19 | 29.50 | 414.57 | 80.60 |
| 20829 | 95.84 | 1805.57 | 324.13 | 925.21 | 315.25 |
| 19469 | 95.84 | 134.02 | 40.80 | 367.99 | 99.90 |
| 12673 | 95.84 | 106.88 | 41.08 | 40.72 | 22.46 |
| 18095 | 95.84 | 1118.60 | 126.43 | 801.84 | 125.83 |
| 19665 | 95.81 | 204.31 | 35.07 | 88.59 | 51.54 |
| 2348 | 95.81 | 97.18 | 36.13 | 463.64 | 200.40 |
| 13940 | 95.72 | 100.29 | 27.43 | 216.02 | 51.74 |
| 12682 | 95.62 | 511.62 | 150.58 | 1734.71 | 588.20 |
| 13157 | 95.59 | 99.31 | 44.78 | 328.67 | 105.58 |
| 15277 | 95.56 | 1199.28 | 124.15 | 856.07 | 134.65 |
| 6055 | 95.56 | 447.44 | 133.36 | 1045.52 | 255.69 |
| 3145 | 95.56 | 152.93 | 22.06 | 426.44 | 138.00 |
| 16731 | 95.53 | 164.04 | 17.44 | 86.12 | 38.17 |
| 1431 | 95.53 | 84.36 | 35.10 | 462.05 | 168.52 |
| 3934 | 95.50 | 716.78 | 83.73 | 1225.51 | 254.53 |
| 15339 | 95.47 | 139.74 | 20.03 | 227.15 | 74.31 |
| 21959 | 95.41 | 234.36 | 36.74 | 132.11 | 42.91 |
| 13104 | 95.32 | 217.32 | 35.96 | 479.57 | 130.05 |
| 15246 | 95.23 | 104.02 | 19.45 | 63.14 | 17.15 |
| 12355 | 95.20 | 55.04 | 2.97 | 32.72 | 17.38 |
| 6869 | 95.20 | 79.10 | 7.52 | 32.43 | 29.17 |
| 23839 | 95.17 | 215.43 | 62.86 | 469.65 | 119.97 |
| 11615 | 95.14 | 539.91 | 16.66 | 412.37 | 87.18 |
| 1479 | 95.11 | 92.37 | 36.66 | 221.32 | 62.74 |
| 2107 | 95.11 | 260.72 | 38.29 | 437.31 | 95.82 |
| 19268 | 95.08 | 1507.38 | 104.73 | 1082.49 | 316.16 |
| 21587 | 95.08 | 63.47 | 12.04 | 184.59 | 76.44 |
| 8215 | 95.08 | 916.05 | 104.30 | 1510.03 | 332.10 |
| 14353 | 95.05 | 92.56 | 11.29 | 55.60 | 17.26 |
| 17378 | 95.02 | 212.42 | 29.92 | 131.90 | 39.98 |
| 6629 | 95.02 | 314.77 | 37.87 | 540.04 | 121.47 |
| 12095 | 94.99 | 365.17 | 58.23 | 1298.24 | 810.83 |
| 8739 | 94.99 | 97.84 | 18.34 | 265.76 | 118.29 |
| 25377 | 94.93 | 56.11 | 8.35 | 26.88 | 13.79 |
| 1510 | 94.93 | 412.23 | 94.86 | 837.44 | 225.06 |
| 19347 | 94.93 | 82.73 | 6.92 | 47.68 | 20.04 |
| 23307 | 94.90 | 142.12 | 10.93 | 93.63 | 26.00 |
| 18524 | 94.90 | 410.60 | 75.64 | 697.54 | 141.17 |
| 24615 | 94.84 | 1270.53 | 105.47 | 933.13 | 210.70 |
| 17823 | 94.84 | 683.68 | 66.28 | 459.89 | 95.30 |
| 1511 | 94.81 | 28.36 | 22.05 | 333.19 | 206.19 |
| 989 | 94.78 | 38.30 | 12.87 | 147.38 | 60.50 |
| 12276 | 94.78 | 72.82 | 16.26 | 186.84 | 61.45 |
| 19936 | 94.78 | 417.94 | 86.08 | 787.51 | 166.53 |
| 5297 | 94.75 | 143.95 | 30.44 | 352.41 | 109.46 |
| 19679 | 94.75 | 329.18 | 166.41 | 754.53 | 202.48 |
| 1798 | 94.69 | 119.14 | 47.77 | 336.07 | 205.61 |
| 16070 | 94.60 | 96.59 | 3.46 | 128.18 | 52.11 |
| 23625 | 94.57 | 138.13 | 48.08 | 319.20 | 91.62 |
| 16775 | 94.57 | 349.58 | 178.66 | 1164.24 | 399.53 |
| 21882 | 94.51 | 486.74 | 47.85 | 758.64 | 167.24 |
| 24582 | 94.45 | 69.68 | 15.24 | 31.85 | 17.38 |
| 14996 | 94.42 | 206.77 | 60.78 | 471.76 | 163.11 |
| 24590 | 94.36 | 43.33 | 17.37 | 166.07 | 70.63 |
| 4473 | 94.36 | 67.70 | 30.48 | 172.24 | 49.29 |
| 8640 | 94.33 | 66.36 | 5.36 | 141.04 | 58.77 |
| 23806 | 94.33 | 167.38 | 49.48 | 459.19 | 167.23 |
| 21086 | 94.21 | 164.64 | 11.89 | 103.24 | 34.93 |
| 21586 | 94.18 | 70.26 | 31.01 | 220.53 | 67.79 |
| 2632 | 94.09 | 197.64 | 7.08 | 154.04 | 30.64 |
| 21305 | 94.06 | 194.67 | 46.54 | 437.54 | 129.56 |
| 18269 | 94.00 | 394.51 | 86.48 | 771.13 | 179.69 |
| 5496 | 93.96 | 268.43 | 102.39 | 651.85 | 166.35 |
| 14983 | 93.93 | 3935.84 | 130.20 | 5873.51 | 4368.56 |
| 729 | 93.93 | 39.48 | 6.73 | 77.25 | 26.06 |
| 1929 | 93.93 | 476.55 | 93.68 | 868.90 | 216.79 |
| 347 | 93.87 | 123.84 | 14.40 | 78.57 | 23.09 |
| 3863 | 93.87 | 25.92 | 20.32 | 196.57 | 85.56 |
| 20740 | 93.84 | 355.52 | 75.34 | 210.92 | 62.22 |
| 17923 | 93.81 | 83.10 | 5.93 | 58.07 | 17.69 |
| 15926 | 93.75 | 149.75 | 18.03 | 92.20 | 42.90 |
| 25692 | 93.75 | 70.08 | 7.62 | 156.74 | 181.44 |
| 4504 | 93.75 | 445.80 | 139.02 | 1087.15 | 323.13 |
| 1159 | 93.75 | 590.14 | 150.75 | 991.96 | 225.85 |
| 13939 | 93.72 | 124.71 | 48.61 | 325.12 | 109.46 |
| 17469 | 93.72 | 34.52 | 5.63 | 72.44 | 30.50 |
| 17836 | 93.69 | 121.68 | 5.52 | 90.78 | 19.92 |
| 22124 | 93.60 | 116.89 | 12.88 | 78.17 | 21.00 |
| 20960 | 93.54 | 443.32 | 50.92 | 295.69 | 74.33 |
| 5497 | 93.48 | 371.29 | 150.42 | 785.01 | 190.34 |
| 21672 | 93.48 | 474.43 | 83.01 | 314.66 | 77.75 |
| 22669 | 93.45 | 61.36 | 13.28 | 33.21 | 14.07 |
| 15844 | 93.36 | 70.68 | 14.50 | 37.72 | 16.43 |
| 20780 | 93.33 | 152.07 | 119.67 | 539.74 | 202.23 |
| 20809 | 93.33 | 437.50 | 34.89 | 329.95 | 63.72 |
| 21585 | 93.18 | 157.63 | 45.39 | 342.07 | 89.26 |
| 13369 | 93.12 | 232.19 | 7.82 | 184.45 | 38.15 |
| 21123 | 93.09 | 321.71 | 96.61 | 661.80 | 184.33 |
| 15242 | 93.06 | 108.52 | 12.92 | 80.06 | 15.30 |
| 1081 | 93.03 | 278.96 | 102.51 | 527.65 | 126.56 |
| 4589 | 92.97 | 724.19 | 281.99 | 1414.61 | 338.33 |
| 8664 | 92.82 | 246.38 | 136.12 | 98.44 | 245.29 |
| 1877 | 92.82 | 314.31 | 125.56 | 652.38 | 170.00 |
| 23699 | 92.76 | 186.00 | 34.99 | 331.03 | 104.73 |
| 474 | 92.73 | 490.32 | 88.10 | 749.79 | 130.85 |
| 1447 | 92.70 | 268.68 | 38.24 | 201.70 | 34.81 |
| 8984 | 92.67 | 399.31 | 28.86 | 308.62 | 53.47 |

[0276] TABLE 5E

| GLGC | LDA | Tox Group | Tox Group | Non-Tox | Non-Tox |
|---|---|---|---|---|---|
| Identifier | Score | Mean | SD | Group Mean | Group SD |
| 17570 | 99.82 | 642.60 | 29.35 | 240.16 | 79.04 |
| 25470 | 99.79 | 125.97 | 5.72 | 31.22 | 18.52 |
| 19377 | 99.76 | 215.21 | 4.72 | 109.43 | 24.18 |
| 455 | 99.73 | 571.19 | 126.84 | 138.41 | 189.56 |
| 896 | 99.67 | 191.75 | 36.71 | 23.81 | 21.26 |
| 9309 | 99.67 | 329.43 | 22.61 | 174.98 | 41.72 |
| 17226 | 99.64 | 253.12 | 22.46 | 577.21 | 117.15 |
| 699 | 99.61 | 74.54 | 12.40 | 23.01 | 34.32 |
| 13563 | 99.55 | 355.81 | 42.90 | 937.62 | 228.58 |
| 22540 | 99.49 | 599.57 | 49.16 | 1780.91 | 551.74 |
| 23780 | 99.43 | 120.05 | 46.77 | 20.80 | 30.16 |
| 17289 | 99.43 | 410.41 | 33.11 | 1059.53 | 278.91 |
| 21959 | 99.40 | 327.36 | 32.91 | 131.72 | 41.66 |
| 13973 | 99.34 | 247.62 | 42.45 | 33.40 | 20.04 |
| 22984 | 99.34 | 266.02 | 27.63 | 100.26 | 30.89 |
| 11421 | 99.31 | 341.72 | 20.35 | 194.63 | 40.25 |
| 22618 | 99.31 | 117.66 | 20.00 | 30.61 | 11.80 |
| 5497 | 99.28 | 248.05 | 17.62 | 785.70 | 189.15 |
| 5929 | 99.28 | 168.33 | 15.69 | 36.89 | 20.17 |
| 16007 | 99.25 | 128.45 | 19.80 | 21.47 | 13.08 |
| 16610 | 99.25 | 316.65 | 10.82 | 165.32 | 65.78 |
| 12606 | 99.25 | 130.99 | 7.64 | 295.10 | 99.03 |
| 17695 | 99.21 | 249.77 | 34.66 | 668.20 | 180.15 |
| 895 | 99.21 | 668.52 | 123.70 | 177.65 | 76.45 |
| 23810 | 99.21 | 84.71 | 11.03 | 27.57 | 13.19 |
| 3083 | 99.21 | 158.35 | 14.18 | 74.00 | 21.63 |
| 16967 | 99.18 | 136.29 | 21.82 | 33.25 | 18.18 |
| 17290 | 99.18 | 509.27 | 62.67 | 1294.21 | 373.99 |
| 20494 | 99.15 | 297.13 | 78.23 | 1055.83 | 319.86 |
| 894 | 99.15 | 1783.60 | 174.73 | 652.12 | 224.42 |
| 16913 | 99.15 | 613.71 | 52.52 | 1257.86 | 287.28 |
| 11079 | 99.12 | 328.58 | 20.15 | 185.07 | 44.66 |
| 5206 | 99.12 | 507.97 | 41.61 | 176.59 | 17.00 |
| 15273 | 99.09 | 132.66 | 22.37 | 32.60 | 18.78 |
| 16726 | 99.09 | 352.81 | 48.90 | 1059.59 | 226.33 |
| 17256 | 99.09 | 125.36 | 14.47 | 429.20 | 121.73 |
| 19058 | 99.06 | 122.17 | 14.88 | 52.83 | 19.42 |
| 17227 | 99.06 | 499.29 | 60.99 | 982.39 | 179.08 |
| 1801 | 99.06 | 255.70 | 34.95 | 89.47 | 28.47 |
| 23958 | 99.06 | 203.79 | 34.98 | 61.18 | 25.94 |
| 23778 | 99.03 | 364.40 | 111.41 | 62.36 | 35.91 |
| 20167 | 99.03 | 96.57 | 19.35 | 24.31 | 11.29 |
| 3269 | 99.03 | 366.86 | 112.74 | 81.91 | 44.65 |
| 3572 | 99.03 | 172.95 | 63.76 | 38.98 | 21.80 |
| 16675 | 99.00 | 328.75 | 104.16 | 29.43 | 36.26 |
| 7124 | 99.00 | 529.78 | 56.03 | 1203.74 | 312.97 |
| 3925 | 99.00 | 198.37 | 20.86 | 461.33 | 112.52 |
| 410 | 99.00 | 465.49 | 50.55 | 1037.75 | 225.86 |
| 3584 | 99.00 | 203.98 | 20.49 | 61.56 | 30.32 |
| 8325 | 98.97 | 99.90 | 20.29 | 23.02 | 13.28 |
| 20828 | 98.97 | 1005.07 | 82.88 | 323.14 | 162.23 |
| 23533 | 98.97 | 204.49 | 10.44 | 83.11 | 38.10 |
| 1993 | 98.94 | 96.08 | 5.11 | 24.14 | 17.89 |
| 15008 | 98.94 | 306.66 | 36.44 | 576.58 | 114.19 |
| 16676 | 98.91 | 271.51 | 96.32 | 33.53 | 29.58 |
| 4450 | 98.91 | 136.12 | 13.21 | 279.34 | 61.49 |
| 15437 | 98.91 | 193.06 | 63.58 | 32.08 | 19.16 |
| 12616 | 98.91 | 144.41 | 20.14 | 60.76 | 20.41 |
| 7665 | 98.91 | 723.79 | 74.48 | 290.61 | 94.65 |
| 17301 | 98.88 | 593.47 | 75.23 | 238.07 | 75.73 |
| 16674 | 98.88 | 180.45 | 57.13 | 27.50 | 22.94 |
| 1564 | 98.88 | 1294.14 | 223.87 | 44.50 | 193.91 |
| 16082 | 98.88 | 129.78 | 28.85 | 40.75 | 17.41 |
| 23532 | 98.88 | 124.66 | 30.17 | 22.30 | 16.51 |
| 1462 | 98.85 | 1628.61 | 155.82 | 431.68 | 216.05 |
| 9084 | 98.85 | 145.53 | 46.17 | 40.68 | 17.08 |
| 6022 | 98.85 | 414.10 | 35.32 | 217.84 | 63.57 |
| 3099 | 98.85 | 554.56 | 35.33 | 894.32 | 163.71 |
| 17535 | 98.82 | 560.61 | 73.51 | 244.84 | 64.97 |
| 23699 | 98.82 | 137.82 | 16.18 | 331.30 | 104.43 |
| 17514 | 98.82 | 358.61 | 50.80 | 817.29 | 188.14 |
| 5952 | 98.82 | 255.47 | 23.17 | 83.50 | 40.80 |
| 535 | 98.79 | 96.78 | 13.35 | 38.89 | 21.47 |
| 21651 | 98.79 | 211.95 | 80.37 | 26.88 | 22.79 |
| 5496 | 98.79 | 219.25 | 23.70 | 652.26 | 165.76 |
| 15175 | 98.79 | 116.18 | 37.93 | 319.43 | 57.36 |
| 23961 | 98.79 | 379.40 | 51.33 | 785.34 | 150.80 |
| 18168 | 98.79 | 168.33 | 33.83 | 38.38 | 34.80 |
| 16884 | 98.79 | 1053.19 | 76.80 | 1909.01 | 474.48 |
| 25233 | 98.76 | 62.01 | 2.18 | 31.39 | 13.04 |
| 19834 | 98.76 | 416.63 | 72.40 | 169.62 | 42.80 |
| 21122 | 98.76 | 534.05 | 73.79 | 1146.33 | 236.16 |
| 17661 | 98.76 | 580.72 | 105.12 | 262.94 | 68.13 |
| 574 | 98.73 | 912.07 | 67.77 | 352.32 | 185.51 |
| 1409 | 98.73 | 201.45 | 22.59 | 438.68 | 98.73 |
| 20886 | 98.70 | 94.56 | 45.86 | 798.30 | 318.63 |
| 8426 | 98.67 | 120.65 | 12.99 | 49.38 | 20.34 |
| 1490 | 98.67 | 52.85 | 7.86 | 20.79 | 7.83 |
| 17516 | 98.64 | 304.60 | 25.38 | 547.56 | 127.91 |
| 16871 | 98.64 | 206.80 | 46.25 | 79.45 | 24.72 |
| 22927 | 98.64 | 210.74 | 21.37 | 84.48 | 34.52 |
| 7101 | 98.61 | 3734.58 | 971.30 | 404.36 | 664.35 |
| 15790 | 98.61 | 112.29 | 21.33 | 35.96 | 18.51 |
| 457 | 98.61 | 897.31 | 151.83 | 285.93 | 92.35 |
| 1929 | 98.61 | 362.48 | 40.32 | 869.55 | 215.82 |
| 16650 | 98.58 | 650.04 | 84.16 | 256.56 | 84.67 |
| 15002 | 98.55 | 420.90 | 46.06 | 135.44 | 107.26 |
| 17345 | 98.55 | 263.93 | 24.68 | 127.21 | 36.29 |
| 20887 | 98.52 | 191.50 | 66.84 | 871.37 | 342.61 |
| 16649 | 98.52 | 361.29 | 75.07 | 105.60 | 48.12 |
| 7196 | 98.52 | 549.97 | 33.63 | 177.67 | 91.15 |
| 1877 | 98.52 | 254.30 | 28.09 | 652.80 | 169.49 |
| 20582 | 98.52 | 287.05 | 13.73 | 487.15 | 95.43 |

[0277] TABLE 5F

| GLGC | LDA | Tox Group | Tox Group | Non-Tox | Non-Tox |
|---|---|---|---|---|---|
| Identifier | Score | Mean | SD | Group Mean | Group SD |
| 23115 | 96.27 | 218.73 | 37.94 | 504.64 | 158.87 |
| 18285 | 94.66 | 425.99 | 37.64 | 688.90 | 152.65 |
| 18522 | 94.29 | 477.42 | 63.58 | 759.42 | 194.18 |
| 21105 | 93.53 | 188.56 | 23.10 | 300.96 | 60.90 |
| 9504 | 93.05 | 71.31 | 11.15 | 48.44 | 20.69 |
| 13934 | 92.71 | 180.15 | 27.02 | 68.19 | 54.80 |
| 11653 | 92.35 | 269.88 | 75.12 | 561.59 | 194.36 |
| 15489 | 91.68 | 96.70 | 14.21 | 141.82 | 34.76 |
| 3279 | 91.44 | 394.77 | 37.63 | 552.89 | 119.12 |
| 2264 | 91.41 | 134.06 | 11.12 | 101.59 | 24.28 |
| 2282 | 91.08 | 90.03 | 26.05 | 212.24 | 65.58 |
| 22271 | 91.08 | 114.39 | 43.35 | 247.46 | 57.55 |
| 11232 | 90.98 | 413.94 | 45.20 | 291.89 | 76.35 |
| 11326 | 90.95 | 191.68 | 30.66 | 319.99 | 87.52 |
| 1649 | 90.83 | 363.72 | 54.17 | 561.87 | 156.83 |
| 10849 | 90.74 | 108.53 | 15.45 | 73.98 | 26.10 |
| 11618 | 90.72 | 179.78 | 41.87 | 381.46 | 109.96 |
| 13611 | 90.71 | 141.12 | 35.24 | 249.73 | 83.52 |
| 2912 | 90.60 | 1472.50 | 191.19 | 2440.94 | 597.53 |
| 14978 | 90.59 | 115.74 | 17.67 | 69.00 | 30.46 |
| 26133 | 90.48 | 395.06 | 106.85 | 188.25 | 84.91 |
| 783 | 90.47 | 122.89 | 16.37 | 83.12 | 25.36 |
| 11198 | 90.47 | 66.09 | 9.13 | 43.72 | 15.80 |
| 13457 | 90.47 | 108.45 | 8.39 | 75.26 | 26.79 |
| 4280 | 90.44 | 2201.62 | 242.72 | 1538.01 | 535.02 |
| 17268 | 90.32 | 317.63 | 20.88 | 445.26 | 113.01 |
| 25235 | 90.29 | 187.30 | 55.17 | 84.23 | 49.84 |
| 5837 | 90.29 | 586.00 | 88.17 | 850.13 | 202.51 |
| 165 | 90.11 | 145.31 | 43.89 | 58.63 | 36.81 |
| 20555 | 90.10 | 70.09 | 13.74 | 116.38 | 35.29 |
| 24233 | 90.10 | 411.31 | 46.44 | 567.75 | 108.66 |
| 26173 | 90.08 | 265.60 | 25.65 | 171.81 | 48.30 |
| 9332 | 90.02 | 39.70 | 10.71 | 102.53 | 42.52 |
| 4451 | 90.01 | 192.78 | 31.81 | 290.75 | 72.79 |
| 5430 | 89.98 | 60.14 | 21.49 | 135.42 | 58.52 |
| 16887 | 89.89 | 107.51 | 10.43 | 154.97 | 45.52 |
| 4987 | 89.86 | 161.07 | 15.62 | 234.26 | 58.10 |
| 15904 | 89.80 | 81.53 | 10.99 | 56.69 | 23.58 |
| 22985 | 89.78 | 61.31 | 12.25 | 109.17 | 29.50 |
| 2964 | 89.74 | 207.16 | 29.50 | 295.32 | 59.24 |
| 150 | 89.74 | 44.55 | 4.99 | 31.82 | 9.68 |
| 12684 | 89.68 | 216.15 | 19.77 | 153.61 | 44.73 |
| 1946 | 89.66 | 64.08 | 9.55 | 39.55 | 12.41 |
| 10069 | 89.56 | 267.84 | 30.41 | 197.01 | 47.53 |
| 18447 | 89.54 | 602.70 | 133.92 | 1098.88 | 276.35 |
| 19930 | 89.51 | 49.33 | 6.03 | 28.71 | 11.78 |
| 13020 | 89.44 | 111.03 | 18.18 | 74.64 | 23.70 |
| 14410 | 89.40 | 133.78 | 15.12 | 184.02 | 38.17 |
| 22929 | 89.40 | 330.05 | 142.49 | 797.70 | 312.82 |
| 19890 | 89.34 | 114.05 | 11.07 | 80.22 | 26.45 |
| 15028 | 89.26 | 172.40 | 66.68 | 366.39 | 126.77 |
| 6630 | 89.22 | 1020.91 | 101.07 | 1270.63 | 199.90 |
| 8944 | 89.19 | 61.50 | 9.22 | 40.45 | 16.66 |
| 23748 | 89.13 | 67.98 | 29.82 | 154.15 | 63.22 |
| 15039 | 89.11 | 118.00 | 47.79 | 272.70 | 91.84 |
| 20149 | 89.08 | 2751.06 | 487.03 | 1546.67 | 703.21 |
| 21400 | 89.05 | 217.92 | 45.44 | 361.83 | 72.95 |
| 7825 | 89.05 | 120.48 | 23.58 | 70.06 | 27.39 |
| 12945 | 89.02 | 168.30 | 33.30 | 289.09 | 69.55 |
| 1644 | 88.98 | 444.20 | 28.05 | 560.84 | 126.28 |
| 16087 | 88.96 | 147.89 | 19.38 | 87.68 | 30.47 |
| 11075 | 88.93 | 99.43 | 19.68 | 58.88 | 21.11 |
| 19943 | 88.92 | 210.88 | 54.72 | 366.97 | 116.34 |
| 21147 | 88.84 | 223.85 | 45.68 | 361.29 | 80.82 |
| 3407 | 88.84 | 48.51 | 16.65 | 22.82 | 14.74 |
| 12366 | 88.81 | 402.17 | 110.21 | 266.10 | 83.20 |
| 17833 | 88.80 | 178.08 | 13.51 | 132.77 | 41.58 |
| 11968 | 88.75 | 161.58 | 45.48 | 277.70 | 74.95 |
| 6886 | 88.66 | 74.86 | 18.86 | 44.24 | 15.63 |
| 5531 | 88.65 | 41.41 | 2.58 | 32.86 | 11.29 |
| 11866 | 88.65 | 193.70 | 21.24 | 133.49 | 72.18 |
| 17363 | 88.40 | 836.27 | 72.73 | 1036.86 | 193.05 |
| 21253 | 88.40 | 346.51 | 35.62 | 476.31 | 102.82 |
| 2574 | 88.38 | 110.78 | 17.74 | 72.92 | 19.69 |
| 2439 | 88.38 | 98.92 | 17.04 | 147.82 | 27.80 |
| 9035 | 88.25 | 93.11 | 9.82 | 126.24 | 27.10 |
| 291 | 88.11 | 145.69 | 31.30 | 224.02 | 46.48 |
| 24165 | 88.10 | 119.54 | 15.30 | 72.25 | 33.85 |
| 10071 | 87.87 | 177.18 | 42.47 | 350.75 | 123.95 |
| 187 | 87.75 | 202.63 | 72.64 | 75.52 | 52.59 |
| 28 | 87.68 | 260.01 | 111.55 | 531.88 | 180.16 |
| 17921 | 87.55 | 119.45 | 22.88 | 195.17 | 71.34 |
| 24567 | 87.37 | 34.58 | 19.86 | 111.01 | 63.84 |
| 20617 | 86.99 | 425.33 | 118.93 | 206.81 | 228.40 |
| 22386 | 86.89 | 148.02 | 26.48 | 252.07 | 98.25 |
| 8829 | 86.69 | 454.94 | 86.93 | 283.22 | 86.03 |
| 25921 | 86.50 | 50.94 | 6.86 | 28.33 | 16.05 |
| 25364 | 86.35 | 104.43 | 36.32 | 56.18 | 57.10 |
| 8599 | 86.17 | 222.32 | 55.03 | 389.47 | 116.57 |
| 17357 | 85.93 | 89.91 | 76.51 | 270.04 | 95.73 |
| 20582 | 85.77 | 353.36 | 43.17 | 487.57 | 95.61 |
| 20896 | 85.56 | 83.44 | 18.33 | 141.36 | 40.26 |
| 1535 | 85.53 | 44.01 | 11.60 | 85.58 | 31.50 |
| 15303 | 85.43 | 68.69 | 8.52 | 95.79 | 28.70 |
| 18716 | 85.36 | 53.32 | 13.29 | 29.64 | 11.72 |
| 25662 | 85.35 | 210.06 | 62.21 | 117.83 | 97.01 |
| 24438 | 85.26 | 89.77 | 17.89 | 143.35 | 40.49 |
| 6577 | 85.16 | 122.77 | 12.31 | 178.46 | 48.88 |
| 21193 | 84.95 | 50.26 | 5.87 | 33.25 | 14.85 |
| 1409 | 84.89 | 299.53 | 60.23 | 438.92 | 99.13 |
| 15330 | 84.84 | 36.66 | 19.02 | 81.96 | 24.24 |
| 15191 | 84.83 | 3728.02 | 829.67 | 2407.15 | 1233.18 |
| 6049 | 84.79 | 805.83 | 63.05 | 688.66 | 113.01 |
| 18043 | 84.79 | 99.39 | 38.52 | 41.39 | 22.49 |
| 24431 | 84.79 | 131.55 | 52.25 | 59.17 | 87.36 |
| 3870 | 84.58 | 91.07 | 23.43 | 152.03 | 56.60 |
| 22219 | 84.55 | 61.94 | 15.60 | 37.48 | 62.65 |
| 15642 | 84.42 | 750.42 | 224.71 | 433.34 | 115.91 |
| 24631 | 84.37 | 36.22 | 7.30 | 21.68 | 10.08 |
| 19003 | 84.31 | 141.69 | 17.27 | 102.43 | 33.94 |
| 25777 | 84.09 | 809.02 | 317.73 | 441.84 | 253.01 |
| 23000 | 84.06 | 41.94 | 3.47 | 35.87 | 9.55 |
| 2079 | 84.04 | 190.93 | 36.44 | 304.09 | 90.50 |
| 439 | 84.00 | 28.56 | 7.59 | 45.33 | 16.65 |
| 8426 | 83.89 | 77.60 | 12.47 | 49.42 | 20.66 |
| 16205 | 83.86 | 1418.72 | 140.70 | 1122.95 | 425.85 |
| 5838 | 83.75 | 443.80 | 68.13 | 652.08 | 145.88 |
| 3609 | 83.65 | 185.56 | 111.40 | 434.86 | 172.76 |
| 989 | 83.64 | 106.37 | 20.93 | 147.41 | 60.77 |
| 4373 | 83.62 | 166.60 | 16.69 | 133.42 | 26.68 |
| 22562 | 83.52 | 46.00 | 10.04 | 27.10 | 13.28 |
| 22783 | 83.50 | 566.84 | 84.58 | 347.17 | 212.46 |
| 16227 | 83.44 | 152.60 | 38.37 | 88.54 | 40.73 |
| 25399 | 83.38 | 392.81 | 122.41 | 185.18 | 190.17 |
| 2191 | 83.36 | 42.32 | 13.37 | 22.22 | 8.81 |
| 3512 | 83.28 | 129.79 | 11.72 | 106.87 | 19.31 |
| 22434 | 83.07 | 68.42 | 18.29 | 43.74 | 20.91 |
| 3465 | 82.92 | 173.23 | 36.47 | 263.26 | 79.05 |
| 18246 | 82.90 | 113.80 | 43.37 | 258.83 | 95.85 |
| 16116 | 82.88 | 61.16 | 6.60 | 78.82 | 19.59 |
| 25589 | 82.84 | 220.29 | 33.93 | 150.66 | 41.90 |
| 1529 | 82.83 | 226.95 | 35.67 | 294.63 | 70.00 |
| 22781 | 82.81 | 229.37 | 43.64 | 143.62 | 72.36 |
| 13974 | 82.76 | 355.79 | 36.94 | 315.24 | 173.81 |
| 13610 | 82.68 | 257.86 | 38.84 | 365.13 | 107.29 |
| 23781 | 82.57 | 67.71 | 7.21 | 85.97 | 27.49 |
| 25647 | 82.56 | 437.20 | 166.12 | 209.40 | 238.75 |
| 24566 | 82.52 | 103.57 | 24.04 | 179.92 | 89.90 |
| 25686 | 82.52 | 899.95 | 98.60 | 749.37 | 152.25 |
| 1453 | 82.50 | 89.33 | 27.93 | 52.20 | 26.79 |

[0278] TABLE 5G

| GLGC | LDA | Tox Group | Tox Group | Non-Tox | Non-Tox |
|---|---|---|---|---|---|
| Identifier | Score | Mean | SD | Group Mean | Group SD |
| 472 | 99.03 | 243.72 | 82.34 | 732.71 | 178.26 |
| 22675 | 98.67 | 118.93 | 55.69 | 28.15 | 15.37 |
| 574 | 98.51 | 1391.19 | 255.85 | 347.01 | 165.41 |
| 1564 | 98.51 | 924.30 | 353.42 | 42.69 | 192.73 |
| 15003 | 98.33 | 454.25 | 157.22 | 31.60 | 90.05 |
| 15004 | 98.30 | 770.01 | 324.95 | 154.94 | 147.16 |
| 646 | 98.30 | 83.09 | 64.74 | 528.44 | 191.02 |
| 15002 | 98.27 | 571.32 | 171.32 | 133.34 | 101.38 |
| 22592 | 98.27 | 1074.58 | 313.00 | 224.39 | 160.59 |
| 10015 | 98.18 | 563.53 | 77.79 | 229.49 | 80.02 |
| 10983 | 98.15 | 26.59 | 14.05 | 150.11 | 58.58 |
| 20816 | 98.12 | 1222.71 | 372.23 | 405.88 | 177.08 |
| 14929 | 98.12 | 2704.92 | 750.05 | 750.97 | 385.07 |
| 17325 | 98.06 | 566.28 | 234.26 | 55.28 | 99.39 |
| 25702 | 97.97 | 1078.58 | 151.22 | 623.33 | 125.71 |
| 16350 | 97.91 | 140.55 | 45.36 | 43.66 | 26.40 |
| 6039 | 97.88 | 656.26 | 129.35 | 309.49 | 76.09 |
| 645 | 97.85 | 22.16 | 19.08 | 135.98 | 49.42 |
| 10109 | 97.82 | 1679.00 | 1324.10 | 1190.54 | 238.15 |
| 10016 | 97.79 | 518.59 | 107.36 | 208.97 | 79.42 |
| 21797 | 97.79 | 751.43 | 151.51 | 331.28 | 105.33 |
| 20885 | 97.75 | 86.92 | 67.69 | 590.89 | 224.65 |
| 18751 | 97.72 | 1011.52 | 204.86 | 514.43 | 129.28 |
| 18503 | 97.69 | 87.10 | 55.82 | 769.37 | 319.53 |
| 10839 | 97.69 | 522.43 | 88.99 | 296.05 | 56.93 |
| 4327 | 97.66 | 213.79 | 52.87 | 82.05 | 36.57 |
| 24211 | 97.63 | 363.77 | 83.59 | 128.82 | 74.63 |
| 1551 | 97.57 | 44.36 | 13.06 | 122.96 | 105.41 |
| 20848 | 97.57 | 1070.75 | 145.58 | 548.58 | 158.87 |
| 22321 | 97.54 | 321.53 | 86.82 | 93.58 | 65.67 |
| 11205 | 97.54 | 218.47 | 59.26 | 555.88 | 160.64 |
| 23651 | 97.51 | 3310.38 | 741.12 | 733.68 | 659.72 |
| 20481 | 97.51 | 104.65 | 12.92 | 201.59 | 40.93 |
| 4856 | 97.51 | 225.36 | 26.28 | 113.64 | 35.44 |
| 14677 | 97.45 | 165.57 | 17.88 | 69.76 | 30.34 |
| 15876 | 97.45 | 2120.60 | 249.97 | 1361.28 | 237.57 |
| 15132 | 97.42 | 556.28 | 65.10 | 314.76 | 79.74 |
| 16245 | 97.42 | 69.92 | 89.96 | 412.35 | 124.91 |
| 19188 | 97.42 | 527.70 | 117.58 | 1311.37 | 331.19 |
| 20884 | 97.39 | 71.11 | 94.30 | 738.14 | 289.89 |
| 1422 | 97.39 | 102.77 | 18.65 | 300.99 | 104.53 |
| 5838 | 97.36 | 301.27 | 68.21 | 652.99 | 143.93 |
| 15955 | 97.18 | 283.29 | 93.14 | 689.98 | 159.09 |
| 7307 | 97.18 | 92.05 | 30.06 | 28.29 | 16.83 |
| 21509 | 97.18 | 356.98 | 61.72 | 91.05 | 94.62 |
| 736 | 97.15 | 1042.03 | 152.24 | 635.04 | 130.62 |
| 17357 | 97.12 | 50.26 | 40.35 | 270.21 | 95.37 |
| 15662 | 97.06 | 163.93 | 19.51 | 93.95 | 27.11 |
| 13646 | 97.06 | 1401.63 | 217.84 | 815.38 | 181.16 |
| 17807 | 97.06 | 1436.26 | 188.44 | 842.88 | 218.96 |
| 19679 | 97.03 | 257.82 | 106.61 | 757.15 | 199.62 |
| 23961 | 97.00 | 451.82 | 79.40 | 786.13 | 150.14 |
| 16204 | 96.97 | 1384.43 | 194.54 | 865.08 | 172.51 |
| 18750 | 96.91 | 341.14 | 53.21 | 168.24 | 62.25 |
| 5208 | 96.88 | 256.89 | 147.95 | 977.27 | 392.75 |
| 25419 | 96.81 | 31.08 | 22.07 | 149.42 | 67.18 |
| 7964 | 96.81 | 121.19 | 45.58 | 325.72 | 93.20 |
| 19824 | 96.75 | 72.58 | 25.39 | 216.05 | 72.84 |
| 3834 | 96.75 | 132.71 | 15.15 | 223.31 | 50.13 |
| 16929 | 96.69 | 1743.43 | 228.03 | 1095.03 | 207.82 |
| 11849 | 96.69 | 1317.16 | 211.89 | 773.90 | 177.28 |
| 18612 | 96.69 | 212.66 | 25.56 | 128.14 | 27.31 |
| 1141 | 96.60 | 436.63 | 69.87 | 241.00 | 65.86 |
| 17514 | 96.57 | 454.63 | 81.01 | 818.94 | 186.75 |
| 4441 | 96.54 | 1550.03 | 172.22 | 1061.96 | 187.57 |
| 25802 | 96.54 | 845.70 | 105.36 | 521.07 | 117.59 |
| 12332 | 96.54 | 184.06 | 71.27 | 549.08 | 160.38 |
| 24108 | 96.54 | 257.44 | 35.85 | 149.90 | 36.24 |
| 1382 | 96.51 | 90.08 | 11.91 | 49.24 | 15.74 |
| 4360 | 96.45 | 162.70 | 43.83 | 333.15 | 72.47 |
| 4445 | 96.39 | 803.11 | 134.14 | 477.79 | 96.26 |
| 25415 | 96.36 | 32.48 | 27.25 | 161.84 | 72.36 |
| 17284 | 96.30 | 121.14 | 16.57 | 218.48 | 58.98 |
| 2125 | 96.27 | 190.48 | 54.94 | 69.66 | 70.52 |
| 6614 | 96.21 | 183.60 | 64.33 | 438.27 | 117.69 |
| 17361 | 96.18 | 28.93 | 11.40 | 138.07 | 55.62 |
| 13647 | 96.15 | 1685.74 | 240.33 | 965.67 | 279.68 |
| 3121 | 96.09 | 495.24 | 184.53 | 1291.00 | 320.21 |
| 23093 | 96.03 | 106.37 | 12.36 | 186.37 | 43.33 |
| 20873 | 96.03 | 3443.13 | 613.84 | 2121.19 | 488.68 |
| 15135 | 96.00 | 1256.66 | 187.64 | 774.12 | 176.10 |
| 6405 | 95.90 | 202.88 | 43.49 | 403.99 | 105.10 |
| 968 | 95.78 | 29.31 | 9.99 | 81.27 | 22.89 |
| 19943 | 95.78 | 148.72 | 40.47 | 367.33 | 115.68 |
| 5199 | 95.57 | 231.08 | 78.06 | 560.22 | 167.42 |
| 16150 | 95.51 | 274.61 | 48.72 | 520.97 | 135.92 |
| 23758 | 95.45 | 88.49 | 20.75 | 175.01 | 41.28 |
| 21078 | 95.42 | 318.58 | 74.48 | 629.47 | 142.80 |
| 28 | 95.42 | 145.06 | 98.13 | 532.55 | 178.76 |
| 2465 | 95.39 | 67.67 | 23.37 | 131.86 | 26.71 |
| 1508 | 95.33 | 269.31 | 91.76 | 654.52 | 194.51 |
| 3610 | 95.33 | 430.67 | 215.13 | 1122.89 | 327.90 |
| 18629 | 95.30 | 1002.30 | 147.79 | 653.52 | 144.64 |
| 3069 | 95.27 | 95.79 | 24.02 | 181.96 | 42.00 |
| 25467 | 95.21 | 320.12 | 106.53 | 737.06 | 245.44 |
| 20810 | 94.99 | 2328.92 | 400.59 | 1448.17 | 356.77 |
| 4449 | 94.72 | 115.32 | 31.26 | 243.54 | 69.77 |
| 15653 | 94.60 | 1852.53 | 268.29 | 1284.72 | 282.04 |
| 24770 | 94.57 | 60.89 | 37.80 | 244.14 | 106.68 |
| 20716 | 94.54 | 407.31 | 96.00 | 723.45 | 165.86 |
| 1549 | 94.54 | 114.38 | 21.37 | 201.87 | 48.01 |
| 21950 | 94.42 | 493.04 | 82.54 | 812.67 | 152.27 |
| 1546 | 94.36 | 122.71 | 35.02 | 244.53 | 64.28 |
| 24564 | 94.35 | 97.01 | 57.45 | 615.45 | 190.61 |
| 24563 | 94.16 | 24.77 | 36.61 | 322.32 | 110.47 |
| 457 | 94.10 | 658.43 | 132.04 | 285.53 | 94.14 |
| 17198 | 94.10 | 174.10 | 183.51 | 910.03 | 269.39 |
| 18502 | 93.98 | 124.08 | 73.30 | 765.24 | 269.62 |
| 21695 | 93.92 | 142.04 | 27.58 | 49.80 | 30.26 |
| 16351 | 93.86 | 224.63 | 88.04 | 65.23 | 32.31 |
| 3870 | 93.84 | 56.07 | 22.14 | 152.24 | 56.26 |
| 1993 | 93.77 | 93.20 | 19.75 | 23.92 | 17.40 |
| 19040 | 93.71 | 706.16 | 170.63 | 181.75 | 113.25 |
| 7196 | 93.65 | 574.19 | 128.31 | 176.23 | 87.09 |
| 1501 | 93.65 | 224.82 | 95.99 | 51.78 | 53.84 |
| 20886 | 93.62 | 80.08 | 149.92 | 801.44 | 315.41 |
| 20849 | 93.47 | 566.69 | 140.91 | 281.36 | 87.91 |
| 1809 | 93.44 | 275.58 | 89.54 | 34.04 | 133.49 |
| 1463 | 93.38 | 1519.27 | 270.01 | 664.00 | 313.79 |
| 7489 | 93.33 | 22.54 | 9.10 | 72.97 | 31.20 |
| 18453 | 93.28 | 88.03 | 19.21 | 218.34 | 72.82 |
| 16726 | 93.28 | 486.85 | 132.99 | 1061.35 | 225.30 |
| 20887 | 93.22 | 168.32 | 177.62 | 874.64 | 339.69 |
| 2109 | 93.19 | 1476.03 | 210.52 | 911.33 | 166.60 |
| 1462 | 93.19 | 954.56 | 196.88 | 432.34 | 223.37 |
| 25718 | 93.13 | 683.37 | 89.19 | 419.94 | 86.09 |
| 17159 | 93.07 | 1527.58 | 315.26 | 787.22 | 213.24 |
| 17104 | 93.04 | 855.38 | 133.20 | 481.52 | 111.05 |
| 17401 | 93.04 | 2406.67 | 718.29 | 1005.70 | 409.58 |
| 23854 | 93.04 | 1043.25 | 158.05 | 521.42 | 171.16 |
| 3430 | 92.98 | 1105.90 | 415.94 | 451.02 | 154.70 |
| 19768 | 92.92 | 1379.96 | 280.91 | 786.38 | 167.89 |
| 25691 | 92.89 | 1341.48 | 251.62 | 775.97 | 169.40 |
| 7197 | 92.89 | 474.21 | 129.15 | 188.31 | 86.11 |

[0279] TABLE 5H

| GLGC | LDA | Tox Group | Tox Group | Non-Tox | Non-Tox |
|---|---|---|---|---|---|
| Identifier | Score | Mean | SD | Group Mean | Group SD |
| 1698 | 95.69 | 476.04 | 217.52 | 66.29 | 80.81 |
| 19254 | 93.32 | 450.27 | 111.28 | 243.51 | 70.21 |
| 23917 | 92.66 | 1506.66 | 499.29 | 718.95 | 184.83 |
| 17541 | 92.42 | 1949.27 | 848.82 | 715.92 | 315.92 |
| 20803 | 91.23 | 799.85 | 172.29 | 470.96 | 121.12 |
| 1537 | 90.76 | 257.23 | 167.48 | 25.97 | 54.59 |
| 25069 | 90.61 | 345.14 | 130.65 | 122.58 | 64.89 |
| 18990 | 90.28 | 86.48 | 40.00 | 20.60 | 20.74 |
| 20795 | 89.27 | 395.60 | 169.67 | 145.49 | 73.47 |
| 6014 | 89.18 | 250.89 | 107.92 | 79.07 | 39.75 |
| 13609 | 89.08 | 127.39 | 51.22 | 239.16 | 63.31 |
| 353 | 88.14 | 319.61 | 99.94 | 169.89 | 88.77 |
| 19252 | 88.05 | 1076.93 | 223.42 | 699.29 | 132.43 |
| 1399 | 87.58 | 525.84 | 225.50 | 194.83 | 76.18 |
| 20802 | 87.50 | 435.04 | 93.17 | 244.10 | 82.49 |
| 20804 | 87.44 | 1875.82 | 427.00 | 1059.53 | 324.98 |
| 24192 | 87.16 | 197.41 | 91.63 | 74.59 | 46.05 |
| 2059 | 87.00 | 193.67 | 24.25 | 136.36 | 35.16 |
| 11755 | 86.73 | 376.55 | 164.92 | 141.89 | 130.13 |
| 14970 | 86.63 | 129.68 | 33.81 | 200.04 | 40.68 |
| 21038 | 86.52 | 242.02 | 70.96 | 103.82 | 41.91 |
| 21039 | 86.46 | 195.33 | 59.92 | 78.33 | 43.60 |
| 22352 | 86.44 | 284.98 | 97.78 | 147.56 | 105.44 |
| 4944 | 86.29 | 211.24 | 47.96 | 119.87 | 58.35 |
| 2242 | 86.21 | 1439.71 | 469.38 | 2188.97 | 546.30 |
| 20035 | 86.06 | 430.87 | 178.90 | 180.79 | 99.78 |
| 14347 | 85.85 | 400.13 | 169.40 | 165.49 | 124.98 |
| 14633 | 85.60 | 234.78 | 89.03 | 88.80 | 83.21 |
| 15964 | 85.54 | 674.79 | 216.85 | 1091.41 | 285.42 |
| 12812 | 85.49 | 52.00 | 16.73 | 97.11 | 34.86 |
| 22502 | 85.39 | 158.92 | 82.43 | 53.23 | 48.19 |
| 11840 | 85.36 | 122.01 | 37.49 | 67.99 | 20.17 |
| 354 | 85.33 | 388.15 | 110.75 | 216.19 | 104.30 |
| 23314 | 85.33 | 562.77 | 365.79 | 72.82 | 278.18 |
| 13610 | 85.29 | 239.35 | 63.10 | 365.74 | 106.91 |
| 3816 | 85.24 | 464.69 | 118.27 | 309.23 | 67.90 |
| 15171 | 84.95 | 419.71 | 164.49 | 224.19 | 79.03 |
| 22501 | 84.65 | 492.96 | 180.94 | 251.35 | 55.90 |
| 8820 | 84.40 | 597.48 | 343.99 | 137.31 | 114.55 |
| 5863 | 84.29 | 88.93 | 23.67 | 139.47 | 34.68 |
| 24235 | 84.25 | 1152.14 | 527.92 | 473.62 | 203.30 |
| 405 | 83.80 | 132.67 | 34.34 | 208.32 | 63.52 |
| 12331 | 83.65 | 391.83 | 107.95 | 591.12 | 141.29 |
| 1410 | 83.60 | 34.40 | 19.24 | 89.22 | 43.41 |
| 22197 | 83.56 | 181.41 | 38.36 | 111.12 | 43.86 |
| 17892 | 83.55 | 153.95 | 40.92 | 306.40 | 134.74 |
| 21513 | 83.49 | 75.92 | 24.74 | 120.24 | 29.73 |
| 11429 | 83.43 | 212.12 | 34.36 | 269.26 | 41.65 |
| 20895 | 83.42 | 188.70 | 90.22 | 303.22 | 74.58 |
| 12848 | 83.34 | 297.78 | 63.29 | 431.68 | 92.39 |
| 18259 | 83.24 | 519.34 | 278.97 | 208.74 | 145.33 |
| 3822 | 83.20 | 1346.58 | 265.08 | 925.26 | 284.34 |
| 24246 | 83.14 | 450.51 | 118.31 | 305.90 | 95.78 |
| 21632 | 83.14 | 122.74 | 47.18 | 31.65 | 49.47 |
| 18396 | 83.12 | 111.98 | 44.34 | 66.03 | 26.28 |
| 3053 | 83.04 | 154.60 | 38.76 | 96.88 | 33.21 |
| 16718 | 83.02 | 771.65 | 152.36 | 1131.02 | 291.60 |
| 12979 | 82.91 | 827.72 | 363.04 | 363.63 | 189.87 |
| 26319 | 82.82 | 76.87 | 13.91 | 48.99 | 22.63 |
| 352 | 82.73 | 127.68 | 32.93 | 81.40 | 54.77 |
| 17850 | 82.65 | 478.49 | 74.33 | 350.42 | 68.02 |
| 16726 | 82.61 | 775.42 | 171.63 | 1060.46 | 228.56 |
| 25902 | 82.59 | 112.19 | 22.14 | 159.55 | 48.13 |
| 6765 | 82.55 | 507.81 | 142.81 | 730.21 | 168.95 |
| 22625 | 82.55 | 203.73 | 89.37 | 109.20 | 101.37 |
| 20086 | 82.52 | 270.19 | 119.18 | 107.78 | 72.84 |
| 22414 | 82.49 | 91.38 | 20.25 | 62.37 | 32.42 |
| 15069 | 82.45 | 156.30 | 69.08 | 89.93 | 53.08 |
| 23435 | 82.42 | 143.51 | 70.04 | 32.23 | 45.61 |
| 13607 | 82.37 | 34.94 | 7.53 | 22.53 | 9.86 |
| 15382 | 82.29 | 978.24 | 634.06 | 120.29 | 179.44 |
| 22656 | 82.26 | 199.64 | 38.98 | 123.05 | 53.17 |
| 26083 | 82.21 | 1826.66 | 491.08 | 1187.90 | 721.09 |
| 19184 | 82.21 | 185.49 | 78.89 | 78.67 | 75.04 |
| 13611 | 82.20 | 130.10 | 78.13 | 250.25 | 82.89 |
| 16039 | 82.15 | 697.44 | 191.99 | 482.12 | 97.81 |
| 2924 | 82.14 | 213.38 | 38.03 | 154.90 | 50.18 |
| 8283 | 82.11 | 273.51 | 122.40 | 128.67 | 44.94 |
| 4235 | 82.01 | 583.10 | 107.05 | 411.30 | 95.75 |
| 22413 | 81.99 | 109.06 | 23.31 | 68.44 | 38.34 |
| 3091 | 81.96 | 479.65 | 112.26 | 714.58 | 157.74 |
| 1651 | 81.95 | 628.76 | 65.78 | 789.11 | 181.29 |
| 8211 | 81.93 | 3918.21 | 2663.36 | 3502.10 | 1459.77 |
| 20841 | 81.92 | 143.31 | 33.78 | 95.74 | 25.14 |
| 12978 | 81.88 | 178.61 | 68.70 | 96.11 | 47.83 |
| 13349 | 81.88 | 200.63 | 47.75 | 132.83 | 38.04 |
| 20082 | 81.87 | 91.12 | 20.35 | 66.30 | 28.33 |
| 1439 | 81.65 | 147.91 | 28.34 | 225.64 | 53.27 |
| 14346 | 81.56 | 203.45 | 102.23 | 50.68 | 82.80 |
| 15470 | 81.55 | 446.71 | 86.23 | 334.66 | 93.68 |
| 15295 | 81.48 | 211.13 | 62.16 | 133.01 | 44.12 |
| 20443 | 81.46 | 161.56 | 35.20 | 113.93 | 27.53 |
| 2979 | 81.44 | 245.69 | 57.16 | 282.97 | 42.84 |
| 24033 | 81.42 | 259.06 | 80.18 | 347.59 | 75.37 |
| 1558 | 81.39 | 321.49 | 76.64 | 200.81 | 63.40 |
| 24377 | 81.36 | 145.34 | 38.16 | 203.71 | 49.55 |
| 15296 | 81.36 | 211.59 | 76.79 | 126.72 | 51.34 |
| 15032 | 81.33 | 183.52 | 59.26 | 265.32 | 74.21 |
| 19433 | 81.22 | 249.89 | 135.26 | 95.01 | 61.36 |
| 4956 | 81.16 | 164.38 | 98.90 | 69.29 | 29.02 |
| 18011 | 80.90 | 67.94 | 34.59 | 27.48 | 28.90 |
| 4592 | 80.90 | 249.94 | 54.72 | 177.09 | 36.45 |
| 25253 | 80.87 | 356.00 | 58.62 | 290.00 | 68.77 |
| 18449 | 80.81 | 729.28 | 116.57 | 610.20 | 123.99 |
| 17736 | 80.81 | 182.31 | 146.86 | 69.27 | 157.44 |
| 20801 | 80.66 | 227.27 | 55.54 | 150.06 | 48.38 |
| 22412 | 80.58 | 140.47 | 30.74 | 91.22 | 45.78 |
| 18597 | 80.46 | 1089.16 | 347.96 | 559.47 | 193.08 |
| 21239 | 80.43 | 229.76 | 97.82 | 106.28 | 59.82 |
| 15574 | 80.39 | 173.01 | 25.25 | 215.63 | 33.89 |
| 18967 | 80.39 | 337.68 | 55.22 | 487.47 | 203.79 |
| 3016 | 80.37 | 4148.89 | 2854.50 | 3998.79 | 1813.37 |
| 21305 | 80.36 | 272.12 | 81.64 | 438.75 | 129.17 |
| 24484 | 80.31 | 66.39 | 12.02 | 92.42 | 26.08 |
| 25064 | 80.28 | 2074.70 | 700.66 | 1115.73 | 310.65 |
| 4392 | 80.03 | 3259.52 | 1607.18 | 2948.56 | 850.63 |
| 18300 | 79.97 | 206.84 | 132.88 | 487.38 | 169.27 |
| 24900 | 79.96 | 488.04 | 143.15 | 638.38 | 155.04 |
| 25098 | 79.90 | 93.64 | 67.91 | 36.16 | 34.64 |
| 21147 | 79.81 | 268.70 | 99.55 | 361.28 | 80.70 |
| 15750 | 79.71 | 47.36 | 18.14 | 21.51 | 14.89 |

[0280] TABLE 5I

| GLGC | LDA | Tox Group | Tox Group | Non-Tox | Non-Tox |
|---|---|---|---|---|---|
| Identifier | Score | Mean | SD | Group Mean | Group SD |
| 2242 | 82.51 | 1386.39 | 557.25 | 2237.29 | 505.01 |
| 5601 | 80.41 | 570.05 | 236.57 | 903.71 | 216.83 |
| 4944 | 80.39 | 210.32 | 80.95 | 114.51 | 51.54 |
| 15032 | 78.99 | 176.05 | 67.41 | 270.72 | 70.95 |
| 13610 | 78.86 | 260.43 | 88.06 | 371.73 | 104.73 |
| 3610 | 78.84 | 722.35 | 368.53 | 1146.23 | 311.02 |
| 5863 | 78.76 | 96.37 | 30.11 | 141.94 | 33.29 |
| 1529 | 78.54 | 203.36 | 69.83 | 300.60 | 65.42 |
| 17682 | 78.29 | 507.13 | 211.81 | 773.82 | 172.62 |
| 10985 | 78.22 | 735.68 | 231.86 | 1069.30 | 225.65 |
| 21632 | 77.91 | 98.75 | 74.15 | 27.96 | 44.65 |
| 28 | 77.64 | 315.43 | 178.66 | 545.11 | 171.54 |
| 15964 | 77.61 | 745.68 | 276.40 | 1111.07 | 273.12 |
| 17550 | 77.50 | 879.01 | 298.17 | 1290.95 | 333.72 |
| 23314 | 77.31 | 506.68 | 414.87 | 47.74 | 245.21 |
| 17524 | 77.19 | 794.19 | 308.69 | 1135.59 | 259.89 |
| 11618 | 77.12 | 257.75 | 117.01 | 388.64 | 105.31 |
| 23435 | 77.07 | 107.07 | 69.42 | 28.24 | 40.65 |
| 812 | 76.93 | 105.28 | 36.08 | 153.16 | 36.80 |
| 13609 | 76.92 | 163.77 | 55.10 | 243.19 | 61.57 |
| 3091 | 76.77 | 535.18 | 168.51 | 724.55 | 150.86 |
| 16312 | 76.70 | 108.77 | 62.22 | 45.54 | 31.63 |
| 20694 | 76.61 | 688.47 | 220.38 | 933.57 | 204.17 |
| 19679 | 76.55 | 499.67 | 216.56 | 771.74 | 190.03 |
| 14970 | 76.36 | 144.83 | 50.08 | 203.14 | 37.69 |
| 24496 | 76.32 | 72.15 | 40.14 | 113.67 | 35.59 |
| 10818 | 76.28 | 251.30 | 167.92 | 480.32 | 177.62 |
| 18337 | 76.16 | 1120.66 | 375.56 | 1593.01 | 326.83 |
| 1698 | 76.15 | 259.77 | 253.73 | 57.45 | 46.82 |
| 2702 | 76.15 | 433.75 | 181.46 | 270.79 | 68.25 |
| 17755 | 76.09 | 278.24 | 99.73 | 390.16 | 92.04 |
| 7489 | 75.92 | 37.03 | 20.90 | 75.16 | 30.46 |
| 21654 | 75.86 | 551.82 | 178.12 | 366.37 | 116.43 |
| 15299 | 75.82 | 120.11 | 57.11 | 72.50 | 54.88 |
| 13349 | 75.79 | 183.06 | 52.76 | 130.07 | 35.07 |
| 1159 | 75.77 | 712.96 | 239.20 | 1011.11 | 211.67 |
| 18272 | 75.77 | 134.16 | 52.28 | 179.70 | 40.85 |
| 23005 | 75.72 | 694.34 | 270.62 | 901.12 | 190.44 |
| 8721 | 75.64 | 109.17 | 63.60 | 188.60 | 63.43 |
| 10887 | 75.63 | 42.57 | 19.85 | 65.79 | 22.04 |
| 3916 | 75.59 | 472.89 | 195.40 | 675.96 | 140.94 |
| 16314 | 75.54 | 110.20 | 71.12 | 41.23 | 39.76 |
| 22554 | 75.51 | 387.64 | 139.23 | 544.84 | 133.65 |
| 5384 | 75.41 | 90.12 | 61.25 | 28.04 | 36.31 |
| 7936 | 75.30 | 107.61 | 27.73 | 139.51 | 30.80 |
| 5923 | 75.17 | 439.81 | 176.29 | 606.68 | 131.73 |
| 19184 | 75.15 | 190.82 | 119.94 | 71.94 | 64.87 |
| 21239 | 75.09 | 197.82 | 98.17 | 101.23 | 52.71 |
| 3874 | 74.97 | 637.40 | 187.18 | 871.96 | 181.31 |
| 5900 | 74.94 | 205.87 | 72.79 | 265.10 | 54.52 |
| 7784 | 74.81 | 532.12 | 161.80 | 699.90 | 128.21 |
| 18522 | 74.81 | 548.81 | 212.63 | 772.15 | 185.03 |
| 22569 | 74.81 | 417.82 | 171.09 | 628.93 | 157.19 |
| 2555 | 74.79 | 134.28 | 53.66 | 81.97 | 40.03 |
| 9673 | 74.72 | 35.38 | 16.35 | 65.52 | 26.97 |
| 4473 | 74.68 | 122.22 | 55.23 | 175.55 | 47.15 |
| 23917 | 74.67 | 1098.72 | 458.70 | 701.40 | 145.27 |
| 20458 | 74.64 | 271.25 | 94.25 | 374.56 | 94.29 |
| 6674 | 74.54 | 1776.75 | 507.96 | 2387.57 | 539.31 |
| 4360 | 74.46 | 253.43 | 81.01 | 337.54 | 69.89 |
| 3995 | 74.45 | 447.64 | 135.49 | 615.34 | 139.51 |
| 6046 | 74.40 | 135.01 | 56.88 | 197.57 | 60.74 |
| 11164 | 74.38 | 332.33 | 139.83 | 485.92 | 129.73 |
| 9079 | 74.38 | 581.21 | 173.48 | 749.66 | 159.41 |
| 15955 | 74.37 | 490.57 | 195.79 | 701.12 | 150.24 |
| 22612 | 74.35 | 330.37 | 111.38 | 469.08 | 108.90 |
| 6765 | 74.29 | 544.27 | 202.38 | 740.81 | 159.94 |
| 21147 | 74.26 | 274.00 | 87.67 | 366.40 | 77.47 |
| 4291 | 74.22 | 180.51 | 91.51 | 288.32 | 84.88 |
| 4463 | 74.19 | 86.69 | 63.34 | 154.87 | 56.17 |
| 4462 | 74.15 | 658.57 | 311.71 | 971.30 | 305.73 |
| 9781 | 74.13 | 82.19 | 36.96 | 124.27 | 34.07 |
| 14095 | 74.13 | 270.72 | 76.14 | 358.04 | 71.36 |
| 13618 | 74.08 | 137.35 | 40.63 | 99.14 | 26.21 |
| 18271 | 74.07 | 587.16 | 201.63 | 753.02 | 149.78 |
| 22681 | 74.06 | 507.76 | 361.88 | 202.52 | 156.32 |
| 21157 | 74.05 | 549.82 | 137.16 | 428.96 | 84.27 |
| 23261 | 74.04 | 1121.37 | 378.88 | 1550.48 | 320.61 |
| 2370 | 74.04 | 876.31 | 227.54 | 1077.70 | 174.57 |
| 10130 | 74.03 | 167.62 | 59.58 | 224.47 | 53.57 |
| 11937 | 74.01 | 101.08 | 23.16 | 79.06 | 19.14 |
| 811 | 73.98 | 180.08 | 66.32 | 257.46 | 56.05 |
| 12979 | 73.96 | 632.88 | 317.40 | 350.02 | 172.71 |
| 23546 | 73.90 | 549.94 | 189.79 | 721.45 | 151.51 |
| 20801 | 73.86 | 215.55 | 69.25 | 146.31 | 43.89 |
| 409 | 73.83 | 746.67 | 188.60 | 947.21 | 178.98 |
| 4440 | 73.83 | 195.43 | 69.44 | 295.13 | 82.26 |
| 21305 | 73.82 | 298.39 | 90.29 | 446.76 | 126.64 |
| 22101 | 73.80 | 85.02 | 82.10 | 175.65 | 80.50 |
| 15330 | 73.67 | 58.68 | 23.74 | 83.24 | 23.75 |
| 20161 | 73.64 | 80.23 | 54.25 | 29.99 | 27.33 |
| 15050 | 73.63 | 541.66 | 141.16 | 688.65 | 174.84 |
| 16813 | 73.61 | 231.75 | 81.80 | 331.59 | 80.11 |
| 18792 | 73.60 | 98.71 | 33.22 | 136.87 | 36.34 |
| 16756 | 73.57 | 240.33 | 81.11 | 168.05 | 37.88 |
| 21341 | 73.57 | 463.05 | 136.52 | 620.74 | 147.68 |
| 3467 | 73.54 | 461.68 | 163.07 | 646.99 | 168.60 |
| 20082 | 73.54 | 102.09 | 38.64 | 64.04 | 25.68 |
| 15039 | 73.52 | 177.90 | 93.67 | 278.20 | 88.82 |
| 9905 | 73.49 | 576.55 | 180.69 | 755.53 | 145.11 |
| 15986 | 73.46 | 214.52 | 95.30 | 326.69 | 83.60 |
| 9053 | 73.45 | 190.10 | 53.40 | 240.11 | 47.80 |
| 1460 | 73.32 | 302.66 | 131.64 | 185.02 | 73.88 |
| 15111 | 73.26 | 785.18 | 294.19 | 1118.72 | 264.03 |
| 15110 | 73.25 | 505.21 | 179.79 | 713.50 | 178.30 |
| 15112 | 73.00 | 1338.19 | 433.49 | 1860.86 | 460.35 |
| 354 | 72.87 | 373.67 | 185.53 | 207.02 | 87.88 |
| 25198 | 72.83 | 49.29 | 21.40 | 25.88 | 13.23 |
| 21683 | 72.77 | 53.28 | 30.07 | 25.72 | 19.21 |
| 16726 | 72.69 | 800.41 | 280.17 | 1075.60 | 214.53 |
| 18300 | 72.65 | 285.09 | 167.97 | 498.43 | 162.68 |
| 353 | 72.64 | 298.13 | 157.91 | 162.53 | 75.73 |
| 4198 | 72.64 | 603.75 | 177.10 | 780.82 | 177.13 |
| 24234 | 72.61 | 391.71 | 269.60 | 175.87 | 68.56 |
| 6641 | 72.55 | 304.37 | 93.60 | 402.49 | 84.73 |
| 15296 | 72.54 | 195.64 | 91.33 | 122.82 | 44.73 |
| 23783 | 72.45 | 376.37 | 89.08 | 460.99 | 76.97 |
| 4327 | 72.45 | 133.62 | 67.44 | 79.38 | 32.50 |
| 18128 | 72.27 | 163.39 | 43.26 | 205.45 | 45.93 |
| 18000 | 72.20 | 1021.88 | 441.49 | 1515.83 | 541.89 |
| 10464 | 72.19 | 90.84 | 30.16 | 122.79 | 30.91 |
| 24235 | 72.19 | 833.55 | 457.25 | 456.15 | 168.02 |
| 1399 | 72.16 | 341.24 | 183.76 | 188.40 | 64.08 |
| 18396 | 72.13 | 106.40 | 55.73 | 63.70 | 20.92 |
| 20753 | 72.02 | 157.80 | 39.75 | 117.80 | 25.81 |
| 25567 | 71.99 | 715.87 | 268.63 | 465.90 | 181.93 |
| 17256 | 71.98 | 313.90 | 166.05 | 436.12 | 114.73 |
| 14121 | 71.92 | 492.14 | 155.94 | 350.47 | 102.93 |
| 16012 | 71.84 | 101.22 | 49.06 | 62.06 | 26.39 |
| 11840 | 71.83 | 96.37 | 36.59 | 66.61 | 18.13 |
| 17684 | 71.81 | 170.05 | 66.05 | 237.48 | 55.17 |
| 15701 | 71.80 | 47.52 | 19.49 | 30.00 | 11.38 |
| 794 | 71.77 | 143.65 | 62.53 | 212.58 | 63.38 |
| 24770 | 71.76 | 149.41 | 95.43 | 249.51 | 105.16 |
| 11483 | 71.74 | 141.85 | 116.98 | 51.93 | 39.61 |
| 15295 | 71.74 | 190.57 | 76.92 | 129.84 | 38.91 |
| 3430 | 71.70 | 651.98 | 230.79 | 441.70 | 152.47 |
| 20056 | 71.66 | 246.08 | 95.02 | 318.69 | 67.21 |
| 12031 | 71.64 | 192.48 | 67.66 | 134.78 | 33.69 |
| 23961 | 71.60 | 644.10 | 203.09 | 793.72 | 143.04 |
| 20803 | 71.57 | 629.95 | 256.03 | 463.60 | 103.39 |
| 17541 | 71.55 | 1248.41 | 894.94 | 692.89 | 234.54 |
| 12978 | 71.54 | 152.96 | 71.09 | 93.05 | 44.29 |
| 17734 | 71.52 | 279.85 | 275.77 | 104.11 | 64.03 |
| 18360 | 71.37 | 154.88 | 51.56 | 206.67 | 54.97 |
| 17196 | 71.36 | 99.85 | 27.32 | 128.69 | 24.41 |
| 17301 | 71.34 | 325.89 | 119.33 | 233.24 | 70.86 |
| 25777 | 71.29 | 882.80 | 556.03 | 413.32 | 182.36 |
| 20298 | 71.28 | 409.64 | 131.62 | 556.86 | 153.30 |
| 16775 | 71.26 | 800.69 | 398.31 | 1188.38 | 388.39 |
| 17357 | 71.23 | 178.34 | 104.23 | 275.09 | 93.07 |
| 18906 | 71.16 | 164.62 | 90.59 | 266.79 | 88.78 |
| 1884 | 71.12 | 208.69 | 48.64 | 169.12 | 34.33 |

[0281] TABLE 5J

| GLGC Identifier | LDA Score | Tox Group Mean | Tox Group SD | Non-Tox Group Mean | Non-Tox Group SD |
|---|---|---|---|---|---|
| 17829 | 92.65 | 759.68 | 633.86 | 2726.68 | 1360.50 |
| 25468 | 90.11 | 657.58 | 614.46 | 2655.18 | 1078.33 |
| 24109 | 89.60 | 75.68 | 42.47 | 221.62 | 99.80 |
| 1684 | 89.47 | 788.73 | 736.74 | 3493.87 | 1629.14 |
| 25469 | 89.11 | 523.47 | 471.39 | 1875.13 | 750.57 |
| 1688 | 88.99 | 985.99 | 996.97 | 5062.79 | 2851.87 |
| 20082 | 86.48 | 84.34 | 9.94 | 66.36 | 28.45 |
| 4312 | 85.90 | 125.63 | 20.84 | 65.92 | 30.34 |
| 14003 | 85.48 | 588.35 | 140.53 | 940.91 | 244.68 |
| 5129 | 85.32 | 88.98 | 34.42 | 179.18 | 56.59 |
| 1685 | 85.14 | 1891.26 | 1942.12 | 8508.70 | 4812.11 |
| 7489 | 84.90 | 26.53 | 14.62 | 73.20 | 31.11 |
| 1687 | 84.65 | 544.45 | 532.83 | 1797.73 | 696.06 |
| 494 | 84.50 | 1183.13 | 183.42 | 774.08 | 266.75 |
| 17743 | 84.44 | 74.48 | 35.97 | 103.03 | 28.16 |
| 20864 | 84.41 | 1168.66 | 229.66 | 1938.09 | 636.48 |
| 16169 | 84.14 | 336.78 | 145.47 | 178.83 | 293.41 |
| 11967 | 83.98 | 1036.36 | 258.41 | 1617.83 | 495.77 |
| 7278 | 83.62 | 1079.66 | 205.71 | 1408.78 | 288.29 |
| 21766 | 83.55 | 202.85 | 35.26 | 284.66 | 63.71 |
| 19112 | 83.49 | 227.09 | 41.26 | 162.45 | 41.41 |
| 247 | 83.22 | 78.49 | 23.83 | 127.29 | 32.51 |
| 18996 | 83.22 | 175.14 | 36.61 | 124.78 | 29.81 |
| 1542 | 83.19 | 741.70 | 151.84 | 1084.13 | 306.88 |
| 17832 | 83.19 | 522.94 | 599.21 | 1979.69 | 796.76 |
| 17332 | 83.07 | 223.62 | 28.27 | 303.15 | 73.10 |
| 1246 | 82.94 | 37.24 | 17.41 | 82.08 | 35.89 |
| 16168 | 82.94 | 544.90 | 152.30 | 363.58 | 234.93 |
| 3615 | 82.64 | 103.67 | 34.57 | 197.88 | 61.86 |
| 21339 | 82.63 | 81.54 | 44.75 | 34.07 | 19.67 |
| 1689 | 82.61 | 1224.06 | 1215.72 | 4062.22 | 1648.08 |
| 24051 | 82.30 | 75.09 | 17.26 | 113.95 | 26.52 |
| 24821 | 82.27 | 34.36 | 7.77 | 54.32 | 19.77 |
| 3610 | 82.03 | 734.56 | 248.13 | 1122.80 | 330.52 |
| 1553 | 81.63 | 1952.70 | 632.62 | 3812.62 | 1693.78 |
| 23505 | 81.63 | 790.51 | 196.75 | 566.19 | 124.65 |
| 21648 | 81.57 | 298.40 | 58.99 | 208.18 | 69.29 |
| 21542 | 81.48 | 75.73 | 11.78 | 53.64 | 19.14 |
| 495 | 81.45 | 270.73 | 74.76 | 127.48 | 87.19 |
| 18468 | 81.39 | 106.55 | 21.07 | 77.98 | 27.23 |
| 15393 | 81.33 | 222.37 | 28.91 | 286.78 | 51.31 |
| 18681 | 81.30 | 388.94 | 53.06 | 282.82 | 72.56 |
| 4012 | 81.23 | 1137.93 | 352.70 | 702.11 | 303.50 |
| 25550 | 81.11 | 130.44 | 21.18 | 99.94 | 23.47 |
| 15599 | 81.08 | 768.89 | 96.61 | 962.67 | 147.01 |
| 245 | 81.08 | 30.84 | 10.46 | 51.23 | 15.00 |
| 3713 | 80.93 | 785.80 | 153.20 | 1070.46 | 218.25 |
| 7681 | 80.90 | 141.52 | 29.83 | 104.60 | 44.18 |
| 19358 | 80.77 | 230.36 | 276.27 | 811.89 | 308.44 |
| 20876 | 80.75 | 1429.42 | 179.01 | 2010.11 | 495.92 |
| 14638 | 80.72 | 103.18 | 17.90 | 77.40 | 20.36 |
| 24843 | 80.63 | 1529.74 | 555.96 | 2719.25 | 1061.12 |
| 4291 | 80.53 | 163.79 | 60.20 | 282.61 | 88.79 |
| 9391 | 80.47 | 668.60 | 95.16 | 863.78 | 204.49 |
| 17234 | 80.44 | 450.62 | 66.65 | 591.69 | 138.75 |
| 20741 | 80.44 | 223.50 | 26.65 | 175.19 | 43.80 |
| 23884 | 80.38 | 55.79 | 14.99 | 30.14 | 28.25 |
| 3941 | 80.35 | 312.71 | 52.90 | 243.38 | 62.94 |
| 6691 | 80.35 | 119.49 | 85.12 | 119.56 | 46.57 |
| 19188 | 80.32 | 899.58 | 236.54 | 1310.91 | 334.70 |
| 2242 | 80.13 | 1529.47 | 425.16 | 2188.74 | 547.68 |
| 20714 | 80.11 | 251.69 | 65.33 | 169.88 | 95.99 |
| 2702 | 80.11 | 352.18 | 62.63 | 280.79 | 90.45 |
| 2812 | 79.92 | 250.95 | 52.91 | 182.78 | 42.75 |
| 20713 | 79.77 | 321.28 | 83.43 | 211.11 | 121.91 |
| 18502 | 79.77 | 372.75 | 197.72 | 765.58 | 271.46 |
| 11324 | 79.74 | 567.08 | 75.40 | 686.26 | 133.81 |
| 12846 | 79.68 | 27.13 | 8.38 | 43.38 | 16.45 |
| 15642 | 79.43 | 574.29 | 92.23 | 434.05 | 119.62 |
| 1844 | 79.43 | 215.94 | 40.20 | 163.57 | 52.46 |
| 9439 | 79.37 | 715.53 | 238.18 | 1099.47 | 279.57 |
| 1312 | 79.31 | 877.80 | 98.92 | 1048.20 | 167.10 |
| 21462 | 79.31 | 332.31 | 60.15 | 254.18 | 55.30 |
| 17887 | 79.25 | 984.05 | 226.20 | 1384.89 | 288.41 |
| 20918 | 79.25 | 568.16 | 114.17 | 403.50 | 84.82 |
| 15237 | 79.22 | 243.57 | 60.93 | 168.46 | 37.30 |
| 11610 | 79.19 | 368.78 | 38.57 | 303.07 | 70.24 |
| 6059 | 79.07 | 132.38 | 25.33 | 187.49 | 43.92 |
| 9035 | 79.04 | 153.86 | 24.05 | 125.62 | 27.03 |
| 2782 | 79.00 | 413.70 | 142.88 | 205.21 | 80.64 |
| 25366 | 78.91 | 89.96 | 46.99 | 44.98 | 55.94 |
| 20866 | 78.89 | 654.18 | 82.36 | 778.30 | 119.91 |
| 13004 | 78.85 | 174.31 | 28.36 | 131.55 | 40.25 |
| 21140 | 78.79 | 125.03 | 91.50 | 108.35 | 40.63 |
| 11136 | 78.76 | 832.19 | 153.81 | 1147.90 | 344.29 |
| 1247 | 78.73 | 839.48 | 329.16 | 1582.78 | 517.89 |
| 25705 | 78.67 | 608.91 | 95.39 | 477.51 | 114.34 |
| 8445 | 78.64 | 50.64 | 6.93 | 39.43 | 18.79 |
| 16521 | 78.64 | 378.70 | 73.70 | 284.05 | 76.53 |
| 3608 | 78.46 | 198.11 | 80.98 | 358.92 | 138.13 |
| 17693 | 78.46 | 1038.76 | 282.54 | 1505.15 | 387.40 |
| 45 | 78.37 | 97.82 | 39.87 | 173.04 | 76.68 |
| 4532 | 78.31 | 171.23 | 78.76 | 279.78 | 96.10 |
| 21914 | 78.27 | 520.42 | 91.18 | 411.11 | 83.67 |
| 1962 | 78.25 | 44.77 | 12.65 | 26.15 | 23.39 |
| 19110 | 77.85 | 342.86 | 94.88 | 201.97 | 95.13 |
| 21575 | 77.78 | 452.86 | 97.04 | 333.22 | 68.32 |
| 19222 | 77.73 | 563.31 | 40.36 | 635.63 | 111.62 |
| 1515 | 77.63 | 246.92 | 46.18 | 186.59 | 43.06 |
| 9073 | 77.63 | 44.73 | 15.30 | 22.89 | 18.48 |
| 573 | 77.61 | 1599.70 | 404.19 | 2608.86 | 1776.16 |
| 16091 | 77.52 | 20.73 | 9.39 | 32.57 | 13.59 |
| 1401 | 77.33 | 69.28 | 14.03 | 52.22 | 17.29 |
| 21147 | 77.30 | 282.41 | 67.81 | 361.22 | 81.20 |
| 15364 | 77.24 | 77.86 | 12.53 | 102.74 | 36.36 |
| 17154 | 77.24 | 245.45 | 57.67 | 186.78 | 60.02 |
| 3454 | 77.15 | 100.75 | 18.92 | 75.51 | 30.81 |
| 15299 | 77.05 | 115.51 | 45.17 | 75.17 | 56.24 |
| 24770 | 76.96 | 124.63 | 58.14 | 244.33 | 107.12 |
| 4011 | 76.93 | 792.94 | 249.01 | 476.14 | 218.70 |
| 108 | 76.86 | 612.75 | 314.84 | 275.19 | 150.60 |
| 16881 | 76.78 | 442.88 | 61.71 | 533.80 | 110.83 |
| 18887 | 76.75 | 165.20 | 20.55 | 143.02 | 37.45 |
| 3886 | 76.75 | 74.47 | 22.33 | 42.38 | 20.96 |
| 11137 | 76.72 | 1138.55 | 218.66 | 1635.07 | 463.88 |
| 18354 | 76.71 | 704.94 | 297.65 | 400.28 | 242.40 |
| 15576 | 76.69 | 520.40 | 95.90 | 421.09 | 93.97 |
| 28 | 76.62 | 309.69 | 141.93 | 532.57 | 180.04 |
| 25290 | 76.53 | 233.26 | 73.75 | 140.64 | 55.93 |
| 21302 | 76.45 | 175.69 | 45.11 | 245.52 | 73.79 |
| 17274 | 76.44 | 77.42 | 33.89 | 146.25 | 65.82 |
| 20801 | 76.44 | 195.17 | 43.72 | 150.37 | 48.96 |

[0282] TABLE 5K

| GLGC Identifier | LDA Score | Tox Group Mean | Tox Group SD | Non-Tox Group Mean | Non-Tox Group SD |
|---|---|---|---|---|---|
| 20848 | 98.67 | 1124.03 | 59.72 | 548.54 | 158.49 |
| 15146 | 98.61 | 552.75 | 212.61 | 125.29 | 66.30 |
| 23123 | 98.54 | 948.44 | 137.32 | 316.83 | 113.69 |
| 25747 | 98.48 | 177.09 | 33.14 | 42.07 | 35.81 |
| 14929 | 98.39 | 2578.08 | 443.16 | 753.00 | 395.31 |
| 15004 | 98.36 | 1003.54 | 557.03 | 153.76 | 135.69 |
| 457 | 98.36 | 766.78 | 198.11 | 285.03 | 90.56 |
| 19040 | 98.36 | 746.18 | 87.47 | 181.80 | 113.32 |
| 12606 | 98.36 | 139.84 | 17.95 | 295.27 | 98.40 |
| 15003 | 98.33 | 555.22 | 226.49 | 31.19 | 86.19 |
| 21165 | 98.33 | 169.51 | 57.41 | 28.30 | 24.49 |
| 22592 | 98.33 | 743.64 | 93.52 | 227.11 | 172.72 |
| 15002 | 98.24 | 640.78 | 258.49 | 133.14 | 98.70 |
| 6416 | 98.21 | 579.40 | 132.32 | 123.67 | 88.39 |
| 20582 | 98.21 | 294.34 | 14.97 | 487.80 | 95.06 |
| 17159 | 98.15 | 1500.61 | 126.72 | 787.85 | 215.88 |
| 1501 | 98.15 | 248.82 | 53.21 | 51.72 | 53.85 |
| 22536 | 98.15 | 3172.12 | 437.63 | 1609.00 | 403.10 |
| 24496 | 98.09 | 30.75 | 7.27 | 111.42 | 36.91 |
| 7196 | 98.06 | 534.14 | 57.92 | 176.74 | 89.27 |
| 7197 | 98.06 | 552.05 | 97.28 | 187.97 | 84.72 |
| 22626 | 98.06 | 466.77 | 115.62 | 84.66 | 75.68 |
| 1809 | 98.03 | 551.79 | 225.15 | 32.34 | 127.23 |
| 17325 | 98.03 | 521.47 | 220.14 | 55.89 | 101.96 |
| 17477 | 98.03 | 241.66 | 34.05 | 111.41 | 35.04 |
| 6842 | 98.00 | 214.44 | 33.38 | 110.48 | 29.69 |
| 18529 | 98.00 | 501.19 | 67.11 | 190.38 | 73.93 |
| 21166 | 97.94 | 715.26 | 183.98 | 263.82 | 92.19 |
| 574 | 97.85 | 1110.83 | 280.01 | 349.51 | 177.04 |
| 24564 | 97.79 | 141.81 | 78.70 | 614.84 | 191.71 |
| 3121 | 97.79 | 435.91 | 101.84 | 1290.92 | 319.95 |
| 24563 | 97.73 | 53.16 | 51.89 | 321.95 | 111.13 |
| 14600 | 97.67 | 377.21 | 86.43 | 184.44 | 47.39 |
| 18657 | 97.67 | 817.51 | 100.75 | 432.51 | 105.51 |
| 3493 | 97.63 | 123.77 | 18.10 | 61.40 | 17.94 |
| 8829 | 97.57 | 506.29 | 44.16 | 283.09 | 85.65 |
| 22631 | 97.57 | 1970.17 | 341.41 | 1035.66 | 227.87 |
| 10532 | 97.54 | 194.55 | 35.06 | 100.22 | 29.27 |
| 21796 | 97.54 | 1253.95 | 159.97 | 690.15 | 198.29 |
| 3125 | 97.51 | 134.07 | 16.15 | 301.07 | 82.87 |
| 7804 | 97.51 | 960.98 | 105.31 | 1652.52 | 334.35 |
| 4944 | 97.51 | 322.82 | 51.74 | 119.57 | 56.74 |
| 1463 | 97.48 | 1492.64 | 275.86 | 664.70 | 314.91 |
| 16394 | 97.42 | 1770.55 | 477.74 | 595.39 | 336.14 |
| 16518 | 97.39 | 1674.58 | 199.69 | 953.13 | 316.63 |
| 21391 | 97.39 | 491.14 | 76.01 | 218.82 | 131.14 |
| 12551 | 97.39 | 81.94 | 8.91 | 164.20 | 42.11 |
| 11157 | 97.36 | 381.78 | 35.68 | 622.92 | 138.68 |
| 7307 | 97.33 | 78.43 | 11.40 | 28.42 | 17.35 |
| 23651 | 97.33 | 2999.14 | 682.81 | 737.32 | 670.73 |
| 18275 | 97.21 | 161.22 | 17.79 | 261.59 | 56.25 |
| 2563 | 97.12 | 270.81 | 32.33 | 158.90 | 37.75 |
| 21797 | 97.12 | 684.25 | 148.72 | 331.98 | 107.52 |
| 25198 | 97.09 | 72.42 | 16.64 | 27.14 | 14.63 |
| 15879 | 97.09 | 195.88 | 18.98 | 348.95 | 67.27 |
| 20885 | 97.06 | 198.55 | 50.26 | 589.85 | 226.42 |
| 24321 | 97.03 | 278.42 | 73.76 | 654.31 | 157.88 |
| 15032 | 97.03 | 98.00 | 17.89 | 265.50 | 73.53 |
| 17221 | 97.03 | 228.07 | 58.62 | 528.15 | 137.97 |
| 2534 | 97.03 | 70.98 | 11.01 | 35.47 | 11.17 |
| 15964 | 97.03 | 389.05 | 102.49 | 1091.29 | 283.24 |
| 16172 | 97.00 | 196.13 | 57.63 | 438.64 | 92.11 |
| 10241 | 97.00 | 135.36 | 24.60 | 59.08 | 23.90 |
| 14677 | 96.97 | 173.50 | 38.06 | 69.76 | 30.14 |
| 18528 | 96.97 | 806.92 | 124.34 | 361.09 | 159.22 |
| 24388 | 96.91 | 366.07 | 61.09 | 177.80 | 66.28 |
| 20884 | 96.88 | 157.01 | 69.56 | 737.17 | 291.54 |
| 22213 | 96.85 | 343.29 | 29.34 | 220.99 | 47.39 |
| 20457 | 96.85 | 203.76 | 31.70 | 396.48 | 99.84 |
| 10015 | 96.85 | 467.24 | 95.91 | 230.34 | 82.57 |
| 14970 | 96.85 | 103.48 | 14.71 | 199.88 | 40.65 |
| 2569 | 96.85 | 169.84 | 58.46 | 421.57 | 98.69 |
| 20828 | 96.82 | 843.23 | 197.75 | 322.31 | 161.39 |
| 15928 | 96.73 | 360.97 | 86.20 | 159.46 | 54.19 |
| 1460 | 96.69 | 382.75 | 102.15 | 191.62 | 82.76 |
| 19991 | 96.66 | 169.60 | 23.54 | 342.07 | 85.80 |
| 14142 | 96.57 | 126.88 | 24.18 | 75.34 | 18.27 |
| 15089 | 96.54 | 343.46 | 36.17 | 177.01 | 69.57 |
| 17473 | 96.51 | 693.48 | 64.78 | 442.45 | 103.23 |
| 20983 | 96.51 | 56.90 | 15.12 | 137.12 | 56.79 |
| 7414 | 96.48 | 301.62 | 37.09 | 183.56 | 50.38 |
| 645 | 96.42 | 46.88 | 15.03 | 135.75 | 49.83 |
| 13610 | 96.30 | 183.04 | 38.90 | 365.50 | 106.63 |
| 17933 | 96.27 | 250.36 | 25.67 | 394.80 | 75.13 |
| 17363 | 96.21 | 639.82 | 80.77 | 1037.93 | 191.02 |
| 5205 | 96.18 | 86.34 | 21.51 | 204.18 | 49.25 |
| 13332 | 96.12 | 184.35 | 54.35 | 438.90 | 102.70 |
| 16885 | 96.12 | 481.97 | 76.93 | 847.27 | 179.62 |
| 4235 | 96.03 | 655.06 | 64.01 | 411.65 | 95.74 |
| 20088 | 96.00 | 216.81 | 25.74 | 391.74 | 86.08 |
| 13723 | 95.97 | 1591.34 | 343.04 | 844.53 | 377.73 |
| 2107 | 95.94 | 286.61 | 18.41 | 438.00 | 95.36 |
| 9212 | 95.94 | 1468.88 | 150.78 | 909.30 | 234.39 |
| 23076 | 95.88 | 225.13 | 23.27 | 126.52 | 43.88 |
| 25064 | 95.88 | 1945.50 | 256.26 | 1121.25 | 327.07 |
| 3995 | 95.85 | 316.65 | 57.49 | 606.04 | 143.87 |
| 7892 | 95.72 | 197.94 | 41.59 | 93.14 | 62.88 |
| 14120 | 95.69 | 344.76 | 63.42 | 681.34 | 196.77 |
| 20458 | 95.48 | 190.71 | 40.37 | 368.84 | 96.93 |
| 968 | 95.42 | 28.67 | 11.78 | 81.24 | 22.91 |
| 15833 | 95.39 | 347.90 | 22.55 | 491.39 | 86.11 |
| 1453 | 95.30 | 123.25 | 24.55 | 52.01 | 26.39 |
| 24643 | 95.30 | 22.65 | 15.29 | 92.91 | 36.14 |
| 1454 | 95.27 | 243.07 | 44.54 | 107.34 | 52.73 |
| 23033 | 95.24 | 416.40 | 24.35 | 579.36 | 117.73 |
| 18074 | 94.97 | 109.26 | 17.39 | 48.61 | 23.99 |
| 9905 | 94.97 | 409.12 | 110.92 | 745.80 | 152.14 |
| 25802 | 94.94 | 793.44 | 106.90 | 521.62 | 118.73 |
| 1214 | 94.88 | 67.47 | 15.18 | 153.85 | 51.68 |
| 2465 | 94.75 | 74.41 | 17.98 | 131.77 | 26.88 |
| 2368 | 94.72 | 338.76 | 47.77 | 623.40 | 131.64 |
| 19824 | 94.72 | 96.00 | 24.52 | 215.81 | 73.19 |
| 646 | 94.72 | 210.57 | 63.36 | 527.32 | 192.98 |
| 14989 | 94.54 | 784.37 | 97.84 | 533.89 | 115.84 |
| 405 | 94.48 | 122.46 | 18.09 | 208.02 | 63.59 |
| 25546 | 94.39 | 236.19 | 103.10 | 500.97 | 150.34 |
| 22910 | 94.33 | 205.38 | 23.87 | 311.27 | 55.99 |
| 15297 | 94.24 | 235.35 | 26.33 | 147.28 | 40.80 |
| 17494 | 94.24 | 137.15 | 20.45 | 216.68 | 41.79 |
| 2010 | 94.21 | 280.66 | 119.92 | 31.78 | 286.73 |
| 19712 | 94.12 | 38.70 | 9.79 | 84.74 | 26.43 |
| 1564 | 94.03 | 1045.96 | 352.70 | 42.41 | 190.11 |
| 17735 | 94.00 | 260.66 | 25.70 | 179.21 | 105.51 |
| 3853 | 94.00 | 89.36 | 14.28 | 154.56 | 34.31 |
| 20481 | 93.94 | 123.57 | 15.86 | 201.41 | 41.25 |
| 1510 | 93.94 | 410.93 | 156.67 | 839.46 | 222.78 |
| 21072 | 93.88 | 97.50 | 27.28 | 199.81 | 51.39 |
| 17800 | 93.81 | 115.79 | 18.77 | 196.78 | 42.92 |
| 14465 | 93.69 | 22.00 | 7.12 | 55.40 | 19.66 |
| 17249 | 93.63 | 662.67 | 98.62 | 1014.19 | 206.07 |
| 4449 | 93.57 | 129.63 | 26.81 | 243.37 | 70.00 |
| 1993 | 93.48 | 86.65 | 13.28 | 24.00 | 17.68 |
| 15540 | 93.45 | 116.06 | 52.11 | 33.92 | 19.17 |
| 12848 | 93.39 | 278.64 | 36.68 | 431.16 | 92.63 |
| 23063 | 93.30 | 242.82 | 57.21 | 390.31 | 77.53 |
| 20816 | 93.24 | 1045.14 | 268.49 | 407.56 | 184.26 |
| 1970 | 93.12 | 395.31 | 97.34 | 159.82 | 57.55 |
| 2629 | 92.97 | 126.65 | 56.54 | 22.18 | 24.99 |
| 4234 | 92.87 | 227.21 | 26.55 | 368.61 | 110.36 |
| 23783 | 92.87 | 303.32 | 50.24 | 456.35 | 79.84 |
| 20849 | 92.82 | 517.85 | 86.60 | 281.86 | 89.61 |
| 3438 | 92.81 | 157.80 | 81.72 | 149.25 | 39.94 |
| 2576 | 92.78 | 43.64 | 15.68 | 84.39 | 23.87 |
| 1472 | 92.75 | 84.81 | 22.82 | 179.09 | 72.56 |
| 1824 | 92.72 | 58.52 | 11.62 | 110.12 | 31.28 |
| 21653 | 92.66 | 435.18 | 92.53 | 237.04 | 66.87 |
| 24649 | 92.66 | 80.76 | 6.94 | 112.06 | 23.19 |
| 17736 | 92.57 | 156.31 | 28.57 | 69.99 | 158.10 |
| 20126 | 92.54 | 206.98 | 53.24 | 75.61 | 46.32 |
| 15850 | 92.48 | 1864.12 | 172.78 | 1413.57 | 279.10 |

[0283] TABLE 5L

| GLGC Identifier | LDA Score | Tox Group Mean | Tox Group SD | Non-Tox Group Mean | Non-Tox Group SD |
|---|---|---|---|---|---|
| 7540 | 97.93 | 486.02 | 138.76 | 157.21 | 80.71 |
| 7299 | 97.84 | 646.85 | 211.22 | 178.29 | 134.95 |
| 4661 | 95.47 | 517.39 | 93.47 | 306.62 | 84.32 |
| 13614 | 94.20 | 559.10 | 110.65 | 323.06 | 68.04 |
| 14595 | 92.40 | 158.58 | 45.64 | 77.34 | 33.09 |
| 22479 | 92.04 | 716.72 | 125.18 | 416.64 | 126.59 |
| 23151 | 91.91 | 200.64 | 48.10 | 356.08 | 100.63 |
| 15964 | 91.55 | 539.50 | 171.88 | 1092.30 | 283.63 |
| 15411 | 91.34 | 532.28 | 101.56 | 303.52 | 93.15 |
| 13615 | 90.34 | 398.90 | 85.87 | 240.22 | 52.84 |
| 12921 | 90.13 | 225.68 | 80.44 | 101.95 | 47.41 |
| 12979 | 89.28 | 754.80 | 237.57 | 364.95 | 194.44 |
| 21354 | 88.97 | 645.15 | 137.68 | 417.97 | 125.69 |
| 16982 | 88.41 | 872.27 | 500.25 | 127.82 | 293.88 |
| 20713 | 88.19 | 613.63 | 263.40 | 208.35 | 112.71 |
| 22619 | 88.03 | 501.19 | 81.50 | 363.98 | 67.50 |
| 24321 | 87.93 | 413.07 | 112.27 | 654.29 | 158.97 |
| 14763 | 87.65 | 304.65 | 189.03 | 37.13 | 142.64 |
| 16521 | 87.65 | 508.30 | 116.48 | 282.94 | 73.28 |
| 24200 | 87.65 | 819.79 | 161.12 | 425.21 | 136.58 |
| 18300 | 87.44 | 220.58 | 102.85 | 486.89 | 169.94 |
| 22698 | 87.20 | 115.27 | 56.59 | 268.84 | 120.86 |
| 13310 | 87.15 | 232.04 | 61.40 | 124.22 | 68.91 |
| 23166 | 87.07 | 254.30 | 83.26 | 126.36 | 61.00 |
| 1894 | 87.01 | 371.06 | 120.65 | 196.88 | 70.39 |
| 22103 | 86.70 | 364.57 | 103.66 | 219.40 | 53.63 |
| 21654 | 86.49 | 610.80 | 129.78 | 376.37 | 127.86 |
| 5183 | 86.42 | 320.31 | 60.86 | 221.48 | 61.55 |
| 6102 | 86.24 | 198.65 | 25.41 | 143.71 | 30.86 |
| 8759 | 86.16 | 246.43 | 53.78 | 156.18 | 40.90 |
| 15191 | 85.85 | 2673.45 | 2339.47 | 2414.85 | 1220.31 |
| 20714 | 85.62 | 475.80 | 301.89 | 167.76 | 86.41 |
| 15538 | 85.56 | 293.17 | 36.37 | 218.71 | 56.03 |
| 4119 | 85.47 | 162.78 | 28.48 | 109.13 | 32.45 |
| 3020 | 85.38 | 424.83 | 78.70 | 293.70 | 77.59 |
| 22737 | 85.25 | 409.70 | 157.83 | 207.21 | 89.14 |
| 19031 | 85.24 | 118.24 | 42.75 | 59.90 | 50.43 |
| 8065 | 85.15 | 225.82 | 45.65 | 163.47 | 35.91 |
| 11057 | 85.12 | 96.32 | 38.40 | 34.75 | 28.49 |
| 9583 | 85.07 | 208.74 | 101.61 | 55.02 | 59.66 |
| 20711 | 84.95 | 140.70 | 71.44 | 33.55 | 34.91 |
| 21975 | 84.94 | 342.10 | 74.80 | 211.95 | 62.48 |
| 15535 | 84.79 | 635.56 | 107.51 | 476.52 | 79.47 |
| 20715 | 84.77 | 296.44 | 124.89 | 126.05 | 58.80 |
| 21683 | 84.77 | 83.44 | 41.31 | 26.99 | 20.17 |
| 18678 | 84.72 | 196.91 | 72.64 | 100.06 | 53.79 |
| 2457 | 84.67 | 464.90 | 167.87 | 288.94 | 67.89 |
| 18269 | 84.55 | 548.35 | 110.14 | 772.70 | 179.32 |
| 21339 | 84.46 | 79.78 | 30.57 | 34.21 | 20.21 |
| 16775 | 84.32 | 572.11 | 282.27 | 1168.56 | 397.36 |
| 8202 | 84.27 | 377.45 | 72.53 | 277.16 | 54.79 |
| 17477 | 84.19 | 180.63 | 52.28 | 111.57 | 35.73 |
| 24197 | 84.17 | 107.40 | 60.94 | 236.21 | 79.34 |
| 15679 | 84.16 | 286.66 | 65.08 | 173.83 | 46.74 |
| 17516 | 84.12 | 769.10 | 139.21 | 544.65 | 126.18 |
| 1807 | 84.08 | 1593.11 | 543.91 | 4019.95 | 2715.05 |
| 1597 | 84.01 | 141.64 | 66.96 | 42.68 | 38.09 |
| 6758 | 83.67 | 60.74 | 21.52 | 28.80 | 13.40 |
| 11324 | 83.67 | 525.31 | 77.71 | 686.40 | 133.36 |
| 15667 | 85.51 | 1304.24 | 352.22 | 2487.79 | 1225.01 |
| 23978 | 83.49 | 74.40 | 21.67 | 112.19 | 29.95 |
| 15446 | 83.46 | 502.42 | 69.06 | 388.27 | 92.25 |
| 23712 | 83.36 | 224.13 | 38.61 | 157.15 | 38.03 |
| 16476 | 83.27 | 533.78 | 102.18 | 788.60 | 304.36 |
| 21014 | 83.22 | 324.17 | 132.01 | 148.40 | 78.26 |
| 5295 | 83.12 | 408.06 | 135.30 | 217.58 | 80.67 |
| 6046 | 83.07 | 101.90 | 48.10 | 194.33 | 61.90 |
| 7451 | 82.91 | 502.98 | 103.58 | 367.08 | 83.19 |
| 7471 | 82.90 | 308.76 | 49.66 | 224.13 | 54.98 |
| 14425 | 82.88 | 332.80 | 79.03 | 203.82 | 68.76 |
| 6833 | 82.80 | 96.02 | 13.68 | 73.52 | 18.72 |
| 12673 | 82.79 | 90.29 | 25.44 | 40.47 | 22.14 |
| 21125 | 82.76 | 96.85 | 28.42 | 152.75 | 47.47 |
| 17950 | 82.75 | 89.75 | 11.67 | 61.68 | 19.97 |
| 8820 | 82.74 | 530.25 | 320.31 | 138.57 | 119.39 |
| 1857 | 82.73 | 341.51 | 97.88 | 203.31 | 63.37 |
| 9026 | 82.73 | 109.55 | 35.12 | 60.22 | 26.27 |
| 19509 | 82.73 | 48.13 | 11.49 | 80.75 | 26.24 |
| 14677 | 82.70 | 123.20 | 43.11 | 69.90 | 30.74 |
| 1858 | 82.64 | 264.03 | 71.62 | 153.29 | 49.94 |
| 21956 | 82.63 | 206.97 | 23.50 | 163.56 | 37.58 |
| 14131 | 82.63 | 69.28 | 24.69 | 33.77 | 24.51 |
| 6431 | 82.62 | 132.49 | 55.91 | 49.83 | 28.54 |
| 17088 | 82.59 | 92.61 | 16.98 | 58.41 | 31.43 |
| 15666 | 82.57 | 1060.02 | 522.22 | 2855.82 | 1671.25 |
| 19011 | 82.51 | 487.88 | 60.90 | 393.64 | 86.49 |
| 20522 | 82.48 | 341.19 | 119.99 | 166.57 | 84.98 |
| 21147 | 82.43 | 260.55 | 45.69 | 361.25 | 81.16 |
| 22321 | 82.42 | 175.73 | 62.89 | 94.40 | 68.17 |
| 17357 | 82.25 | 167.86 | 96.71 | 269.67 | 96.37 |
| 24438 | 82.21 | 98.87 | 20.24 | 143.39 | 40.54 |
| 16552 | 82.19 | 106.93 | 35.18 | 162.92 | 41.40 |
| 23679 | 81.96 | 67.13 | 19.94 | 38.29 | 19.93 |
| 1804 | 81.93 | 1429.11 | 390.65 | 3161.94 | 1771.85 |
| 16446 | 81.63 | 26.33 | 5.45 | 37.15 | 10.18 |
| 24566 | 81.55 | 61.11 | 42.07 | 180.55 | 89.38 |
| 15032 | 81.50 | 153.02 | 48.41 | 265.54 | 73.91 |
| 16681 | 81.28 | 120.46 | 46.82 | 63.39 | 25.75 |
| 23869 | 81.20 | 68.78 | 38.38 | 35.67 | 78.90 |
| 21443 | 81.12 | 204.24 | 81.36 | 91.06 | 49.71 |
| 1422 | 81.09 | 170.29 | 61.30 | 300.89 | 105.05 |
| 16520 | 80.98 | 273.60 | 150.69 | 86.32 | 98.04 |
| 8212 | 80.98 | 2755.24 | 1630.16 | 2776.64 | 1026.95 |
| 16610 | 80.56 | 243.87 | 59.82 | 165.05 | 65.89 |
| 13091 | 80.48 | 52.53 | 22.18 | 93.54 | 32.42 |
| 13004 | 80.46 | 212.11 | 74.18 | 131.27 | 39.09 |
| 20404 | 80.43 | 94.71 | 35.90 | 45.29 | 43.92 |
| 20801 | 80.39 | 235.97 | 71.05 | 150.06 | 48.11 |
| 15409 | 80.33 | 650.73 | 204.15 | 413.05 | 118.78 |
| 2153 | 80.16 | 416.39 | 243.57 | 174.99 | 148.74 |
| 16312 | 80.12 | 102.23 | 41.22 | 49.22 | 37.54 |
| 28 | 80.08 | 305.95 | 229.49 | 532.06 | 179.36 |
| 9541 | 80.05 | 434.33 | 105.00 | 293.71 | 104.56 |
| 4749 | 80.02 | 382.14 | 128.89 | 229.43 | 180.48 |
| 13092 | 79.97 | 78.72 | 26.06 | 126.13 | 38.28 |
| 4290 | 79.94 | 131.21 | 41.46 | 84.46 | 26.82 |
| 20458 | 79.76 | 244.63 | 78.16 | 368.93 | 97.12 |
| 3254 | 79.68 | 261.62 | 54.46 | 188.01 | 48.62 |
| 1943 | 79.66 | 47.96 | 16.20 | 25.73 | 11.95 |
| 24219 | 79.60 | 487.67 | 128.97 | 321.74 | 100.36 |
| 7197 | 79.60 | 330.86 | 107.57 | 188.93 | 88.45 |
| 15137 | 79.56 | 1740.58 | 785.79 | 1800.11 | 446.41 |
| 20457 | 79.40 | 282.98 | 97.45 | 396.37 | 100.16 |
| 18713 | 79.36 | 381.95 | 48.08 | 304.10 | 71.82 |
| 343 | 79.15 | 86.27 | 53.27 | 26.04 | 28.49 |
| 4235 | 79.08 | 495.44 | 76.22 | 412.41 | 97.43 |
| 15421 | 78.89 | 574.98 | 96.06 | 739.12 | 153.32 |
| 19665 | 78.87 | 164.53 | 59.70 | 88.19 | 51.24 |
| 20925 | 78.68 | 466.02 | 114.97 | 342.39 | 120.38 |
| 12276 | 78.61 | 103.82 | 42.09 | 187.47 | 61.18 |
| 24472 | 78.43 | 185.77 | 62.80 | 235.91 | 53.31 |
| 18352 | 78.40 | 338.81 | 174.54 | 155.29 | 86.17 |
| 45 | 78.36 | 76.12 | 49.26 | 173.08 | 76.39 |
| 25453 | 78.35 | 158.39 | 37.24 | 209.35 | 50.63 |
| 7489 | 78.33 | 30.74 | 20.35 | 73.04 | 31.19 |
| 1977 | 78.29 | 187.70 | 37.39 | 133.15 | 38.47 |
| 20523 | 78.29 | 867.83 | 225.50 | 579.11 | 163.88 |
| 17394 | 78.25 | 484.34 | 116.34 | 347.89 | 115.27 |
| 23868 | 78.20 | 339.24 | 209.69 | 170.18 | 283.60 |
| 20961 | 78.19 | 20.76 | 3.97 | 29.87 | 11.94 |

[0284] TABLE 5M

| GLGC Identifier | LDA Score | Tox Group Mean | Tox Group SD | Non-Tox Group Mean | Non-Tox Group SD |
|---|---|---|---|---|---|
| 9583 | 83.08244685 | 136.5487393 | 110.2849532 | 37.66760888 | 13.19753272 |
| 16982 | 82.32427648 | 483.6882478 | 552.3046692 | 49.88186324 | 32.90131915 |
| 15032 | 82.28102403 | 177.3289571 | 70.86858812 | 283.5409217 | 59.40838768 |
| 15964 | 81.60585161 | 743.874312 | 299.3609708 | 1181.361174 | 213.1612425 |
| 12979 | 80.3700673 | 643.9611477 | 322.5396617 | 306.527439 | 85.13902429 |
| 21654 | 80.32714885 | 549.4204342 | 209.6721242 | 339.6935388 | 55.84290884 |
| 19184 | 80.29859221 | 184.5060699 | 138.4017224 | 57.12969511 | 21.21914631 |
| 5461 | 80.12975735 | 363.2475499 | 214.8634774 | 167.0601785 | 45.37528089 |
| 23651 | 79.97244535 | 1637.54072 | 1189.420285 | 542.9096823 | 191.3034224 |
| 14425 | 79.31714567 | 289.2956631 | 105.737495 | 184.9582598 | 40.7473309 |
| 16312 | 78.76788965 | 101.8624891 | 64.40370386 | 38.35845782 | 14.61990063 |
| 22681 | 78.67353585 | 469.7183212 | 361.5563587 | 167.2478183 | 55.584236 |
| 23166 | 78.55613634 | 206.8477645 | 101.4273335 | 108.1093764 | 29.94389506 |
| 1529 | 78.52440674 | 215.9442383 | 69.39046225 | 311.3015724 | 57.33641031 |
| 28 | 78.45860958 | 337.7569525 | 190.3579737 | 572.6706363 | 145.8390237 |
| 2242 | 78.44441476 | 1562.266609 | 687.2650843 | 2311.300749 | 401.81139 |
| 7489 | 78.41251816 | 39.969397 | 22.84173 | 80.91009417 | 28.09717441 |
| 2555 | 78.31866535 | 138.9497043 | 71.0446582 | 72.74579762 | 17.34013384 |
| 22569 | 78.31833136 | 433.3052164 | 165.3260103 | 660.2852423 | 135.0527541 |
| 11618 | 78.26405705 | 253.3853136 | 122.3102383 | 409.7968553 | 86.37081821 |
| 3874 | 77.9921845 | 655.5341186 | 183.3817932 | 905.2090016 | 155.1052713 |
| 17682 | 77.92371537 | 543.6295408 | 230.3423337 | 801.6274752 | 133.4359357 |
| 4291 | 77.81767172 | 182.8583968 | 89.67887639 | 304.1338558 | 72.33137744 |
| 22321 | 77.79228804 | 179.8586879 | 123.2440901 | 75.47084945 | 26.5781107 |
| 21683 | 77.71496802 | 55.09213984 | 33.27371704 | 21.13344315 | 9.738536318 |
| 812 | 77.52008149 | 110.300102 | 37.74055592 | 159.2009582 | 31.00283772 |
| 15928 | 77.50321471 | 230.6186191 | 81.85977686 | 144.792893 | 33.217028 |
| 17361 | 77.49 | 81.56 | 49.55 | 151.85 | 49.33 |
| 3610 | 77.34289675 | 786.5228846 | 383.1597512 | 1195.762426 | 266.7672417 |
| 19040 | 77.34022478 | 341.4502271 | 225.2340943 | 150.6823975 | 34.34075604 |
| 15382 | 77.33170789 | 389.1289702 | 422.3483993 | 77.24627235 | 48.54365298 |
| 6046 | 77.32 | 132.00 | 60.76 | 209.20 | 53.92 |
| 16314 | 77.26 | 103.96 | 76.71 | 33.61 | 21.85 |
| 16168 | 77.11995458 | 630.283295 | 458.341233 | 308.4957265 | 64.72400923 |
| 12978 | 77.09123094 | 161.0616731 | 78.8602948 | 82.73480249 | 24.06911838 |
| 8721 | 76.93057898 | 122.2361625 | 61.9077009 | 198.8519365 | 58.96316989 |
| 21239 | 76.71932666 | 181.7185987 | 94.60956961 | 89.35257633 | 26.32116899 |
| 3091 | 76.72 | 545.67 | 168.85 | 749.73 | 128.16 |
| 13610 | 76.70479785 | 274.9562845 | 90.96833619 | 381.8322514 | 61.62951755 |
| 14970 | 76.68191914 | 152.2102141 | 48.9266423 | 210.6102648 | 31.30381828 |
| 22929 | 76.65586747 | 487.9160657 | 270.6330491 | 875.0391787 | 272.829724 |
| 15299 | 76.64785157 | 136.3012386 | 106.157285 | 61.66374238 | 17.88937389 |
| 3050 | 76.59 | 151.97 | 82.62 | 77.07 | 24.98 |
| 17325 | 76.58205441 | 189.7373516 | 208.0626111 | 31.0587134 | 24.22087464 |
| 24219 | 76.53329103 | 444.4375114 | 155.5594702 | 293.4620384 | 58.4499819 |
| 14929 | 76.3703011 | 1275.172779 | 801.0896181 | 653.6952264 | 132.6222434 |
| 6641 | 76.28696916 | 306.0713042 | 88.62194155 | 420.6952038 | 68.81743517 |
| 19723 | 76.2759473 | 128.2970893 | 90.41070177 | 60.09331086 | 19.39755748 |
| 13151 | 76.2443847 | 1189.02038 | 539.5803104 | 699.6056428 | 197.7526277 |
| 15300 | 76.21582806 | 266.4468852 | 233.7031532 | 96.87648497 | 38.58692577 |
| 16756 | 76.03547035 | 221.6236525 | 72.76140952 | 160.6260948 | 27.82533344 |
| 17161 | 76.03263139 | 1821.710174 | 615.9155321 | 1215.712544 | 234.8577001 |
| 9053 | 75.99806282 | 188.4077043 | 54.90371237 | 248.8278068 | 39.5416499 |
| 20458 | 75.72902924 | 275.504871 | 100.5231472 | 389.1120081 | 82.94622112 |
| 6638 | 75.69462768 | 69.35965051 | 25.19842597 | 99.4446383 | 21.49763394 |
| 24431 | 75.66373307 | 140.4973047 | 186.7414923 | 42.63904535 | 13.19878574 |
| 15110 | 75.64870326 | 524.7385351 | 161.2970513 | 744.3958487 | 164.5366762 |
| 24200 | 75.62916451 | 597.8931172 | 203.1549298 | 387.8593222 | 82.09773986 |
| 3875 | 75.61 | 354.67 | 119.89 | 510.04 | 111.81 |
| 7936 | 75.6144687 | 108.4356886 | 31.04246293 | 144.7023827 | 27.85248861 |
| 3823 | 75.50 | 654.04 | 216.61 | 458.26 | 76.00 |
| 20848 | 75.49473122 | 739.8558427 | 245.0915553 | 506.9787921 | 87.26939539 |
| 1246 | 75.4800354 | 51.06050058 | 35.73888552 | 88.19304576 | 29.97104786 |
| 3995 | 75.44012291 | 463.5694638 | 147.804498 | 633.8236834 | 110.344027 |
| 1460 | 75.37749871 | 290.3524955 | 157.0068948 | 170.5734639 | 30.83287626 |
| 574 | 75.37182078 | 578.2333054 | 363.7499773 | 306.4754643 | 52.52429358 |
| 18300 | 75.28548287 | 313.2217374 | 163.4937659 | 527.1882256 | 147.3671747 |
| 2905 | 75.27729998 | 347.6900677 | 151.3778017 | 208.053687 | 61.26056458 |
| 22197 | 75.25726023 | 157.3709099 | 70.51415356 | 101.3246948 | 27.03541912 |
| 21147 | 75.23404753 | 286.2720645 | 82.6150118 | 378.7980181 | 67.04188806 |
| 15330 | 75.22252467 | 58.49125065 | 22.6188477 | 86.8547667 | 21.0269227 |
| 21391 | 75.21166981 | 385.8061478 | 231.5126036 | 186.3801082 | 64.9269088 |
| 9905 | 75.17125633 | 584.5801895 | 181.1793745 | 780.6799824 | 116.1344345 |
| 20056 | 75.15121658 | 244.8044459 | 87.51577736 | 328.9803149 | 56.49987294 |
| 22612 | 75.13100984 | 343.7327296 | 116.5116157 | 484.2960858 | 98.80695732 |
| 23868 | 75.06003574 | 476.5917806 | 578.566726 | 104.3862329 | 73.16177261 |
| 14458 | 75.02262821 | 66.07115821 | 38.46172099 | 29.15168483 | 17.52209128 |
| 24237 | 74.96551494 | 89.34383693 | 56.62184758 | 42.92380577 | 17.40618436 |
| 14424 | 74.93411934 | 239.4400853 | 296.6620083 | 40.59217046 | 37.53029959 |
| 17401 | 74.88535596 | 1485.695027 | 694.8549568 | 908.508536 | 210.902772 |
| 18906 | 74.86197625 | 170.7813444 | 84.29130131 | 280.2632832 | 81.29656617 |
| 13611 | 74.83642558 | 171.0261776 | 92.33219744 | 268.1311179 | 69.5925432 |
| 5601 | 74.82 | 640.28 | 294.69 | 934.56 | 178.65 |
| 7299 | 74.79100215 | 340.4805627 | 256.9208944 | 144.5353128 | 52.30383717 |
| 12921 | 74.78231826 | 160.5493302 | 75.66485918 | 89.60925607 | 28.73773092 |
| 4463 | 74.76762245 | 101.5953476 | 62.27587437 | 161.6717233 | 53.31108112 |
| 8143 | 74.69080343 | 104.7695109 | 84.13921659 | 29.09088827 | 30.02739607 |
| 10818 | 74.69046943 | 290.080445 | 197.297128 | 507.055784 | 156.484313 |
| 23538 | 74.65656886 | 187.0143437 | 128.8639475 | 88.48179831 | 33.56740662 |
| 4944 | 74.64504601 | 188.8391331 | 90.79119087 | 105.8633001 | 33.59442944 |
| 15111 | 74.61314941 | 829.5271044 | 273.3268883 | 1166.379712 | 236.6780581 |
| 10985 | 74.58459278 | 800.410809 | 240.2270404 | 1100.953535 | 203.6618654 |
| 17357 | 74.57323692 | 177.8296623 | 108.4523586 | 287.6047245 | 80.31450427 |
| 17908 | 74.56789299 | 121.3571079 | 116.1216261 | 42.52999623 | 16.5484268 |
| 4330 | 74.56171407 | 347.3358307 | 137.4559711 | 482.9800669 | 108.2803404 |
| 3121 | 74.54468028 | 959.6912721 | 406.1173378 | 1369.205783 | 250.5821685 |
| 23299 | 74.52480753 | 468.8078098 | 165.8361914 | 330.3112996 | 69.58410495 |
| 20161 | 74.51345168 | 72.01468121 | 53.68059035 | 25.31805526 | 16.61070956 |
| 15089 | 74.51328468 | 251.3256155 | 99.68382039 | 160.3812585 | 49.67999362 |
| 20457 | 74.51311768 | 307.2459887 | 108.9163745 | 417.6507608 | 84.51558942 |
| 22592 | 74.45049348 | 441.3278412 | 302.5254789 | 185.7428044 | 92.86088318 |
| 21025 | 74.37 | 313.31 | 107.42 | 441.97 | 94.86 |
| 20830 | 74.35313372 | 763.4705375 | 278.5082765 | 513.0660947 | 135.9445144 |
| 23261 | 74.33008801 | 1167.643034 | 374.5231911 | 1601.584279 | 272.589167 |
| 15618 | 74.28733655 | 115.8554442 | 40.3151267 | 80.50306764 | 17.75243271 |
| 1422 | 74.27831867 | 203.5115649 | 89.60232364 | 319.0362239 | 84.83935923 |
| 5863 | 74.19832668 | 106.0616484 | 33.34272725 | 146.2567669 | 29.69099415 |
| 6804 | 74.10681184 | 789.9900816 | 408.8443154 | 1302.23147 | 346.2547845 |
| 15986 | 74.09829495 | 229.6581874 | 101.2853036 | 339.5941441 | 70.48693419 |
| 18360 | 74.08076017 | 154.4788107 | 47.05055977 | 214.393766 | 51.15202013 |
| 12349 | 74.04652561 | 196.4837332 | 54.09188201 | 244.5657486 | 51.7956927 |
| 13609 | 74.00076819 | 176.8117791 | 58.87359803 | 251.9175082 | 56.78328918 |
| 19678 | 73.99809622 | 44.46188591 | 60.23324179 | 110.3513435 | 45.83978038 |
| 1727 | 73.94699487 | 105.4102508 | 122.46824 | 22.29966809 | 20.76306568 |
| 18337 | 73.9209432 | 1205.405107 | 398.898709 | 1647.906831 | 276.5380239 |
| 4479 | 73.90691538 | 235.8144938 | 118.8454211 | 131.9693374 | 56.66432098 |
| 12961 | 73.90073646 | 137.3492423 | 37.56911937 | 177.0745243 | 32.15894315 |
| 15879 | 73.8893806 | 284.5730052 | 70.16546857 | 362.8390325 | 59.90658185 |
| 7540 | 73.88403667 | 252.9068785 | 154.8627671 | 138.9588658 | 33.26393784 |
| 1462 | 73.80103873 | 698.281705 | 424.3668671 | 379.7373024 | 81.29117089 |
| 15002 | 73.72672467 | 244.2298557 | 206.548638 | 112.5697128 | 27.72152824 |
| 13727 | 73.69182211 | 67.87259725 | 42.11981673 | 119.1840195 | 37.60278063 |
| 15955 | 73.57 | 515.14 | 191.35 | 728.18 | 122.31 |
| 20035 | 73.51781032 | 306.7725912 | 177.3556465 | 157.6016663 | 53.16881717 |
| 8339 | 73.49175865 | 292.7362043 | 124.6264371 | 423.1068251 | 88.76931187 |
| 811 | 73.48324176 | 192.9770905 | 69.9330111 | 265.1530947 | 46.48636774 |
| 7101 | 73.48 | 1028.63 | 1448.92 | 269.03 | 75.33 |
| 15039 | 73.40876071 | 191.9823051 | 102.7247359 | 287.9523913 | 78.10921214 |
| 3822 | 73.37469314 | 1222.471751 | 463.1311279 | 866.8616534 | 181.1339295 |
| 3959 | 73.36600925 | 453.5922062 | 139.9476597 | 330.9248233 | 74.21747797 |
| 4952 | 73.3546534 | 155.5933788 | 74.76467916 | 95.46100924 | 25.88868161 |
| 13411 | 73.35114644 | 525.6540474 | 243.9929933 | 878.9727098 | 298.4088281 |
| 24496 | 73.34864147 | 77.53936584 | 41.56582163 | 118.8841241 | 29.67076515 |
| 23978 | 73.34279655 | 86.92932267 | 32.18783863 | 116.8288797 | 26.49810705 |
| 11483 | 73.32041883 | 116.3027555 | 97.07083281 | 45.19525799 | 13.89151735 |
| 22885 | 73.32025183 | 1845.034431 | 706.0839859 | 1184.427221 | 338.8455491 |
| 4440 | 73.28 | 210.00 | 74.37 | 306.59 | 75.86 |
| 2195 | 73.27115446 | 58.1346164 | 36.41544415 | 94.82246526 | 34.85537693 |
| 20694 | 73.25712663 | 743.8512961 | 251.4832563 | 959.0486315 | 180.735879 |
| 3467 | 73.26 | 477.56 | 179.67 | 670.32 | 151.77 |
| 14677 | 73.22 | 105.84 | 49.33 | 62.34 | 18.47 |
| 6487 | 73.18247858 | 87.46073345 | 24.66936209 | 113.1656478 | 25.19154745 |
| 3608 | 73.17680065 | 234.714193 | 128.0553145 | 383.4977487 | 124.1499765 |
| 23203 | 73.16243884 | 136.4482476 | 40.60846178 | 175.9440252 | 38.17308244 |
| 10887 | 73.15091598 | 45.59776079 | 19.26180792 | 68.18660382 | 20.96287878 |
| 12561 | 73.12536531 | 102.2762346 | 52.56512622 | 159.1250387 | 45.41988674 |
| 15663 | 73.11718241 | 250.3325832 | 89.69920875 | 172.228523 | 33.35386467 |
| 7196 | 73.11150448 | 293.5589143 | 170.4462218 | 155.3520027 | 40.04001176 |
| 11164 | 73.11 | 349.24 | 142.19 | 507.35 | 120.35 |
| 3941 | 73.0941367 | 308.735741 | 77.67557449 | 230.069061 | 48.84198107 |
| 22554 | 73.07392996 | 415.0183429 | 141.5557663 | 556.6455466 | 106.8579765 |
| 13343 | 73.06808504 | 157.2067443 | 46.99161278 | 208.9077432 | 43.13164312 |
| 12332 | 73.04537332 | 411.1613085 | 193.5891409 | 580.8890108 | 134.5335609 |
| 7128 | 73.02817254 | 239.1426458 | 69.19063177 | 314.3465504 | 55.04435889 |
| 794 | 73.02800554 | 149.9988713 | 59.20316287 | 220.6178599 | 54.39878992 |
| 21632 | 73.02550058 | 81.27734286 | 68.17005823 | 21.99813036 | 38.2953058 |
| 19031 | 73.01998965 | 115.0485875 | 95.43994528 | 48.9126224 | 21.82538707 |
| 20828 | 73.00846679 | 502.2473423 | 271.1834974 | 284.5311051 | 92.4929031 |
| 22101 | 73.0081328 | 95.0688379 | 89.97980952 | 187.4798581 | 72.68823613 |
| 17477 | 72.96554834 | 152.2283562 | 61.41721729 | 103.9500869 | 20.61868868 |
| 21653 | 72.94266963 | 312.5412982 | 114.3057351 | 222.6382613 | 40.97720451 |
| 4789 | 72.94250263 | 59.69316361 | 25.79130654 | 36.25017547 | 16.9263929 |
| 24568 | 72.92747282 | 100.9854279 | 45.77643689 | 166.3747268 | 65.68252702 |
| 23202 | 72.92496785 | 121.8218073 | 37.4223132 | 164.3583568 | 35.739692 |
| 25453 | 72.91945692 | 169.5385768 | 55.06858446 | 219.2370093 | 42.22252817 |
| 13634 | 72.91695195 | 1089.909525 | 505.6176099 | 708.2744112 | 127.1635939 |
| 9673 | 72.89039929 | 41.62752139 | 23.9624369 | 67.9158819 | 25.83115298 |
| 22626 | 72.88555635 | 183.9210533 | 157.8210185 | 66.65379062 | 23.30181235 |
| 13349 | 72.86251065 | 172.7498279 | 55.72890499 | 123.9271713 | 27.77975703 |
| 8829 | 72.82527012 | 370.3425049 | 120.1345988 | 265.086816 | 63.71656822 |
| 15051 | 72.81 | 870.06 | 414.32 | 531.84 | 140.63 |
| 17771 | 72.79387452 | 987.2353328 | 409.5437444 | 656.0935041 | 156.8142212 |
| 14484 | 72.73325429 | 334.2823847 | 89.84388565 | 437.9713071 | 96.59005867 |
| 14185 | 72.70803761 | 286.6012774 | 150.7172826 | 168.4541254 | 57.75119127 |
| 18529 | 72.64224044 | 279.8103006 | 134.5542568 | 172.941485 | 39.31168364 |
| 23946 | 72.63038359 | 163.7394849 | 60.22818988 | 222.3458685 | 52.09881666 |
| 17159 | 72.53636379 | 1017.46374 | 356.3241579 | 743.4742457 | 134.8926558 |
| 21443 | 72.53068586 | 141.5087876 | 81.92489411 | 79.90222801 | 27.46553869 |
| 5855 | 72.51882901 | 48.54935197 | 31.99643857 | 74.57794713 | 25.25898096 |
| 13618 | 72.50196223 | 131.446852 | 42.43820367 | 95.49719596 | 21.0584271 |
| 12716 | 72.48993838 | 131.6741256 | 35.67214558 | 169.4946023 | 38.20699186 |
| 17550 | 72.45587081 | 986.160813 | 374.7937126 | 1326.286035 | 307.3041885 |
| 5474 | 72.45002588 | 535.2923376 | 201.9471092 | 756.7417489 | 194.0568571 |
| 5711 | 72.44701992 | 273.463279 | 99.04844473 | 392.0601198 | 106.5505539 |
| 2912 | 72.39291261 | 1931.737359 | 615.063966 | 2564.077466 | 522.3042249 |
| 9017 | 72.38122276 | 76.73353212 | 33.16762831 | 116.2884854 | 36.84832913 |
| 6059 | 72.36118301 | 154.2019464 | 39.08353915 | 195.0358442 | 41.70427967 |
| 1501 | 72.33913929 | 109.7890806 | 98.72204686 | 39.88217718 | 21.66435281 |
| 8188 | 72.32127052 | 307.4560841 | 113.435179 | 412.5977746 | 118.9863598 |
| 23195 | 72.30156477 | 232.9214407 | 106.7475078 | 322.6563231 | 70.56526638 |
| 7285 | 72.30 | 183.98 | 45.26 | 227.37 | 39.94 |
| 21458 | 72.29321488 | 333.719882 | 163.5279209 | 208.7840327 | 68.3434868 |
| 23957 | 72.26165228 | 111.136839 | 62.08098358 | 56.84170567 | 26.48020347 |
| 7784 | 72.19284915 | 562.8262904 | 162.4051288 | 718.7859352 | 107.9257063 |
| 6416 | 72.17 | 221.69 | 181.98 | 105.92 | 33.73 |
| 19679 | 72.16997044 | 554.0548312 | 249.8434896 | 799.208115 | 160.2227266 |
| 3916 | 72.16429251 | 521.2494374 | 191.635131 | 693.1755282 | 117.6873361 |
| 24388 | 72.16 | 256.14 | 119.20 | 163.06 | 35.67 |
| 4235 | 72.16145355 | 511.7131741 | 134.644402 | 389.7019942 | 70.87532979 |
| 17196 | 72.15544163 | 105.3599138 | 26.38579321 | 132.0773497 | 22.43465669 |
| 21462 | 72.1414138 | 306.539429 | 72.05119023 | 242.5457166 | 45.94897687 |
| 1510 | 72.14124681 | 644.6907685 | 250.3002812 | 882.9239564 | 187.473853 |
| 2348 | 72.13807385 | 327.6327036 | 189.49475 | 501.69599 | 190.9571321 |
| 17524 | 72.1098512 | 874.8824969 | 306.1319417 | 1156.444814 | 234.2742269 |
| 10464 | 72.10116732 | 93.88361398 | 31.76228943 | 126.6499333 | 27.52656727 |
| 7127 | 72.10100032 | 189.6279016 | 95.06964563 | 284.503156 | 81.78200409 |
| 21882 | 72.03520315 | 626.539768 | 164.7108169 | 793.6760678 | 153.0810134 |
| 17339 | 71.9294935 | 1792.985725 | 669.1390035 | 2389.414771 | 537.6641779 |
| 10015 | 71.92414956 | 325.4652102 | 153.5765557 | 212.0585252 | 42.32926652 |
| 20801 | 71.85 | 199.99 | 73.50 | 140.35 | 32.13 |
| 7888 | 71.84 | 318.41 | 78.58 | 247.97 | 40.89 |
| 17256 | 71.80658306 | 324.8525266 | 154.4265957 | 449.9846896 | 98.32616047 |
| 22930 | 71.79455921 | 198.0132602 | 107.4265272 | 333.5952638 | 130.8979194 |
| 3049 | 71.77535445 | 291.7940055 | 154.6257178 | 166.9363278 | 53.28371204 |
| 17734 | 71.76 | 206.37 | 202.42 | 95.30 | 30.54 |
| 20082 | 71.732436 | 92.49771136 | 42.32852743 | 59.76248687 | 14.71505541 |
| 4327 | 71.732436 | 124.904039 | 64.17386639 | 73.50786335 | 19.33196751 |
| 18271 | 71.70638433 | 622.1754394 | 201.2914108 | 765.3878724 | 134.2823131 |
| 1141 | 71.70371236 | 310.4547546 | 97.82116884 | 226.1620877 | 48.17094826 |
| 3713 | 71.69770044 | 870.0920545 | 222.4658473 | 1118.081047 | 183.6493294 |
| 7537 | 71.69469448 | 182.2977249 | 58.80458232 | 237.2841089 | 52.87814656 |
| 22596 | 71.67799469 | 80.40368647 | 26.06975968 | 58.43304066 | 14.91196991 |
| 4360 | 71.67214976 | 269.7964439 | 91.90423108 | 345.4475402 | 58.55070595 |
| 1081 | 71.66630484 | 413.8169497 | 133.9204914 | 554.0918883 | 106.6621528 |
| 2702 | 71.60084167 | 366.9630027 | 146.7576451 | 258.704476 | 48.99924667 |
| 354 | 71.60 | 342.25 | 192.43 | 190.95 | 42.15 |
| 5199 | 71.58898482 | 426.6781047 | 194.5965508 | 588.2380815 | 150.0565394 |
| 25747 | 71.58380789 | 77.46426615 | 61.56836353 | 34.93635566 | 16.33129208 |
| 13633 | 71.57228503 | 490.859187 | 292.9104741 | 281.7702118 | 78.21967829 |
| 20003 | 71.55424926 | 27.26624376 | 18.63775544 | 51.09157179 | 22.27713208 |
| 25198 | 71.54923932 | 41.83738407 | 21.30414887 | 24.46897318 | 10.2887544 |
| 5481 | 71.53187155 | 91.61281005 | 65.17050178 | 28.14592964 | 47.24102799 |
| 13332 | 71.4802692 | 348.318777 | 115.9413156 | 459.9662366 | 88.50144973 |
| 6321 | 71.42616189 | 574.0456997 | 185.5861715 | 430.1525559 | 101.4344889 |
| 4473 | 71.42599489 | 131.0465748 | 57.9009332 | 181.2716922 | 41.7246204 |
| 405 | 71.40862711 | 163.6570742 | 53.25338415 | 214.369048 | 52.02616005 |
| 23872 | 71.40645614 | 128.3896922 | 182.3235051 | 24.91985805 | 23.80373187 |
| 18302 | 71.39142633 | 60.93274749 | 77.95488674 | 124.3849227 | 68.01025453 |
| 15042 | 71.38341043 | 113.7848867 | 77.4706215 | 57.27629582 | 27.29420376 |
| 6382 | 71.3775655 | 168.3590284 | 54.66912751 | 117.2240917 | 30.5916709 |
| 1409 | 71.37422555 | 356.3482649 | 100.2570505 | 457.0897876 | 90.41166982 |
| 10130 | 71.36303669 | 174.0633085 | 65.67212316 | 230.5180359 | 47.39273862 |
| 21125 | 71.34867487 | 116.793056 | 56.17889018 | 159.8219905 | 40.70025457 |
| 20481 | 71.33147409 | 164.2250117 | 44.84688901 | 208.9019923 | 36.59950412 |
| 16859 | 71.33 | 166.91 | 73.19 | 112.81 | 33.48 |
| 16147 | 71.31427331 | 133.2713322 | 41.16539683 | 174.3821982 | 34.98987877 |
| 9699 | 71.31143434 | 40.800459 | 21.59336067 | 56.86011612 | 17.18231905 |
| 10789 | 71.31 | 226.28 | 98.93 | 319.54 | 77.45 |
| 6796 | 71.30592341 | 237.5148442 | 61.53051141 | 182.3973545 | 44.66569526 |
| 410 | 71.28855564 | 870.9734112 | 244.8206654 | 1083.444257 | 197.6148927 |
| 18564 | 71.21123562 | 177.1818749 | 50.68623343 | 222.8971499 | 43.2196108 |
| 12798 | 71.20856365 | 127.9179407 | 41.67147705 | 161.9583087 | 30.85329433 |
| 15004 | 71.20 | 315.68 | 341.04 | 126.60 | 39.41 |
| 21318 | 71.1972078 | 71.28904452 | 31.21133472 | 42.85410721 | 22.48605551 |
| 6039 | 71.14877841 | 398.0605484 | 140.8521054 | 292.5555827 | 43.87001826 |
| 18792 | 71.14527146 | 105.5641832 | 35.06965105 | 140.7557808 | 34.59681697 |
| 15642 | 71.13725556 | 552.6908782 | 175.7519777 | 408.6795547 | 83.65679612 |
| 12812 | 71.1339156 | 71.16451798 | 36.21027548 | 103.4513266 | 31.81785501 |
| 14996 | 71.11671482 | 339.3300514 | 143.9979671 | 507.2107686 | 153.7067385 |
| 498 | 71.08865917 | 683.2994891 | 214.007319 | 507.7755444 | 92.92888055 |
| 10087 | 71.08548621 | 1154.31678 | 346.7061181 | 1463.958309 | 251.6377099 |
| 12331 | 71.08264725 | 472.782575 | 167.0649748 | 617.169582 | 120.6867211 |
| 8477 | 71.07145839 | 659.0457127 | 204.6617645 | 463.617062 | 103.0264273 |
| 13954 | 71.06 | 948.19 | 350.16 | 1298.60 | 301.79 |
| 17907 | 71.03 | 1012.87 | 306.06 | 1257.12 | 200.00 |
| 22656 | 71.02269501 | 175.5960199 | 69.44916713 | 113.0049246 | 41.69051937 |
| 2370 | 71.01401112 | 915.6984826 | 221.2013897 | 1099.411882 | 156.5781346 |
| 10016 | 70.99714434 | 301.5274805 | 145.9792275 | 190.3539826 | 43.03506275 |
| 18269 | 70.99380438 | 637.3872989 | 170.1980876 | 810.1018171 | 163.937515 |
| 22928 | 70.99347038 | 162.5453963 | 62.7086771 | 235.9206416 | 78.67137638 |
| 24321 | 70.99 | 515.86 | 195.77 | 686.86 | 131.04 |
| 23512 | 70.98812645 | 828.9897486 | 249.3344159 | 1077.375262 | 203.7223722 |
| 7903 | 70.98528749 | 350.5453484 | 194.23864 | 521.8749865 | 172.1493708 |
| 6336 | 70.98 | 336.24 | 89.69 | 418.43 | 89.90 |
| 11967 | 70.95 | 1213.17 | 570.43 | 1709.91 | 412.19 |
| 11708 | 70.94270303 | 386.8003922 | 118.0261743 | 291.4028205 | 61.61537016 |
| 20849 | 70.93418614 | 372.7188256 | 145.9724592 | 262.8478403 | 56.35553021 |
| 20086 | 70.92550225 | 176.2588503 | 100.9839636 | 94.57079689 | 56.93242072 |
| 16775 | 70.91949032 | 829.8082119 | 416.7547122 | 1259.056219 | 355.5379472 |
| 1698 | 70.92 | 172.23 | 191.95 | 50.55 | 32.52 |
| 14095 | 70.92 | 281.28 | 79.38 | 369.45 | 63.47 |
| 6765 | 70.91665136 | 585.0367365 | 187.8003804 | 763.3969282 | 148.4962585 |
| 1581 | 70.89978457 | 84.40443826 | 27.89534583 | 62.31427166 | 13.19097482 |
| 22820 | 70.89410664 | 288.1190696 | 111.4524723 | 200.7418441 | 47.57591793 |
| 5990 | 70.85953808 | 366.3519689 | 68.11041757 | 308.364785 | 51.8240886 |
| 22747 | 70.83933134 | 74.14874761 | 30.31242787 | 98.18564151 | 26.53935912 |
| 21885 | 70.82196356 | 142.8105941 | 40.75769988 | 189.0843655 | 42.6957976 |
| 3079 | 70.79674688 | 63.04721313 | 43.40895794 | 28.63200188 | 23.267219 |
| 5923 | 70.79674688 | 483.7836606 | 173.4808852 | 620.2452282 | 121.7386925 |
| 14867 | 70.80 | 101.12 | 62.31 | 165.12 | 71.18 |
| 19235 | 70.79340692 | 763.4928387 | 289.1267594 | 1038.844606 | 281.3859308 |
| 7690 | 70.79090196 | 257.5909963 | 97.89101874 | 171.849413 | 74.75028528 |
| 13111 | 70.79056796 | 174.860056 | 60.32230683 | 227.4712045 | 55.77617287 |
| 1159 | 70.77654014 | 806.917713 | 265.6053539 | 1032.085281 | 192.0252292 |
| 9781 | 70.77069521 | 92.58980656 | 36.11235607 | 127.638116 | 32.75832457 |
| 17393 | 70.75399542 | 204.124932 | 109.1717801 | 121.382968 | 33.63659555 |
| 5329 | 70.7476495 | 33.30547604 | 19.24667641 | 51.50320834 | 17.81606651 |
| 3878 | 70.74197158 | 403.2347516 | 111.4733788 | 513.4119933 | 109.3514016 |
| 9468 | 70.73913261 | 42.8674446 | 35.25182606 | 68.53373052 | 31.39077316 |
| 353 | 70.73 | 272.05 | 161.59 | 149.39 | 40.00 |
| 21305 | 70.70456405 | 335.5403178 | 107.0804394 | 461.1318069 | 122.4271664 |
| 4462 | 70.66481856 | 730.6257892 | 304.6597778 | 995.431334 | 245.7726301 |
| 19768 | 70.64511281 | 963.1099008 | 248.7687166 | 752.6982114 | 130.8907506 |
| 17807 | 70.61939513 | 1025.458861 | 284.1245566 | 795.8935405 | 128.7916384 |
| 7279 | 70.58 | 177.33 | 131.04 | 191.37 | 58.86 |
| 23961 | 70.54775304 | 666.1151134 | 193.4003866 | 805.831464 | 112.8350419 |
| 16520 | 70.54240911 | 132.8613946 | 84.96659613 | 72.6601183 | 44.25249046 |
| 17499 | 70.54190812 | 50.17968339 | 30.54421913 | 22.00448366 | 22.12875837 |
| 14790 | 70.5272123 | 109.4097569 | 74.61549723 | 185.3000757 | 76.25523345 |
| 6916 | 70.52470734 | 317.8219585 | 111.0268929 | 408.6141486 | 85.19381033 |
| 11974 | 70.51318448 | 172.0478497 | 92.75009213 | 244.794786 | 74.37487748 |
| 11455 | 70.50 | 162.65 | 95.78 | 94.80 | 26.70 |
| 7543 | 70.49564971 | 178.547379 | 78.57317657 | 269.0421232 | 91.30723273 |
| 12467 | 70.48 | 91.52 | 43.59 | 57.64 | 16.70 |
| 17684 | 70.48178888 | 183.8798358 | 61.31828646 | 243.7559457 | 49.96031474 |
| 17438 | 70.47026603 | 26.7382404 | 45.54097206 | 57.63231313 | 34.17013966 |
| 13176 | 70.47009903 | 46.41799018 | 20.28410744 | 65.32124446 | 19.51464161 |
| 275 | 70.45339924 | 453.7148571 | 254.4387856 | 576.7986868 | 132.1872501 |
| 14020 | 70.44 | 212.80 | 56.70 | 266.01 | 46.38 |
| 3430 | 70.43636546 | 621.1802909 | 275.8648069 | 418.2233015 | 103.8022286 |
| 6518 | 70.43619846 | 144.0774161 | 37.08502734 | 112.7147406 | 24.8752467 |
| 18303 | 70.44 | 281.64 | 239.24 | 513.56 | 243.07 |
| 5867 | 70.42 | 195.07 | 60.67 | 148.14 | 26.48 |
| 6927 | 70.39010705 | 264.7935922 | 87.90568922 | 348.9047929 | 78.75748433 |
| 25070 | 70.38994005 | 353.201825 | 90.9057057 | 442.8817225 | 89.01735385 |
| 12587 | 70.38426212 | 172.8425554 | 49.41038279 | 225.0384086 | 48.36937066 |
| 20865 | 70.38142316 | 235.5178941 | 58.52316469 | 291.3112086 | 53.15153075 |
| 24236 | 70.36472337 | 98.10809021 | 31.96761671 | 73.04437691 | 15.28584669 |
| 16684 | 70.35620648 | 709.3649229 | 236.7375456 | 508.8945621 | 112.4304221 |
| 9452 | 70.35069555 | 245.7617883 | 292.6221619 | 114.9709603 | 32.36274589 |
| 4199 | 70.33583273 | 447.7856929 | 168.99085 | 592.8718764 | 144.2735394 |
| 11454 | 70.33 | 328.59 | 156.12 | 216.73 | 53.33 |
| 21796 | 70.32764984 | 888.4017259 | 360.4669486 | 657.7468182 | 113.1481704 |
| 19998 | 70.32 | 192.15 | 78.72 | 267.63 | 67.09 |
| 1399 | 70.32 | 291.48 | 158.06 | 180.41 | 40.15 |
| 1463 | 70.30477113 | 1010.906056 | 562.2315641 | 597.6285113 | 147.5163605 |
| 8599 | 70.30143117 | 289.7102636 | 121.7540684 | 408.8106404 | 103.3414894 |
| 19067 | 70.28423039 | 126.0808384 | 48.73348414 | 169.7256121 | 43.06255744 |
| 24235 | 70.27621449 | 713.0504022 | 392.6566221 | 431.1344096 | 115.3208855 |
| 5295 | 70.27320853 | 300.3673 | 122.6395005 | 200.3777563 | 56.99205768 |
| 17157 | 70.27036957 | 66.74546809 | 35.9806367 | 40.40264137 | 14.12606346 |
| 24762 | 70.26986857 | 718.3765021 | 276.1477473 | 983.3177792 | 297.9605419 |
| 22599 | 70.25600775 | 66.34406284 | 31.76809853 | 41.24936186 | 18.37197756 |
| 20829 | 70.25032982 | 1242.416049 | 483.5054646 | 851.3168509 | 199.4060102 |
| 1885 | 70.2439839 | 271.0949115 | 74.76518095 | 352.5464662 | 81.05516141 |
| 7700 | 70.23329604 | 122.8595378 | 82.18167819 | 72.07967282 | 16.69398572 |
| 6711 | 70.22995608 | 67.6521358 | 24.44261842 | 47.10757143 | 22.07497066 |
| 22328 | 70.2127553 | 317.0894814 | 111.2229989 | 404.0684734 | 93.91538499 |
| 13392 | 70.19872748 | 239.3228528 | 71.29262811 | 181.6550147 | 37.08840136 |
| 1798 | 70.18970959 | 258.6239005 | 95.82095389 | 346.7327101 | 96.88717299 |
| 9114 | 70.1811927 | 693.860219 | 204.9305374 | 879.8300873 | 192.7878948 |
| 4933 | 70.17618276 | 388.4071663 | 424.0827485 | 93.57485666 | 104.1871857 |
| 25777 | 70.16465991 | 731.1269475 | 475.1048291 | 385.6387638 | 125.2433796 |
| 5565 | 70.16131995 | 296.7569975 | 131.2082754 | 413.3646434 | 102.2345034 |
| 17420 | 70.14679114 | 61.25008761 | 32.17535043 | 94.12664744 | 32.93397715 |
| 7872 | 70.14111321 | 85.7718341 | 33.42042032 | 118.8883017 | 31.24593067 |
| 19085 | 70.13593627 | 94.39700898 | 39.41352311 | 61.50537192 | 14.57063483 |
| 25567 | 70.13309731 | 673.5066146 | 317.8219004 | 438.9509529 | 133.112788 |
| 21024 | 70.12675139 | 455.6164345 | 93.77946063 | 553.7599162 | 96.12838839 |
| 21105 | 70.12124046 | 249.5365471 | 66.25713529 | 312.1801594 | 54.80674377 |
| 4661 | 70.11873549 | 388.812595 | 126.7826634 | 288.3700687 | 54.8123755 |
| 6635 | 70.1182345 | 193.7443247 | 78.12105317 | 263.6595233 | 72.24389761 |
| 16708 | 70.11255657 | 207.7538048 | 51.36507757 | 256.4151971 | 46.44776023 |
| 2250 | 70.09836175 | 1118.061362 | 305.4698352 | 1406.389129 | 242.1009635 |
| 9067 | 70.09568978 | 803.7783177 | 204.3856207 | 624.9499096 | 138.7609652 |
| 15146 | 70.08166196 | 203.6218298 | 143.5123436 | 112.756109 | 37.18053855 |
| 1478 | 70.02972562 | 270.2709361 | 105.7728946 | 371.6625226 | 79.43883267 |
| 406 | 69.97528431 | 313.9225633 | 96.71895909 | 398.3675185 | 80.50659235 |
| 24234 | 69.97010738 | 302.5101331 | 219.1370069 | 168.0694456 | 50.6457125 |
| 20493 | 69.92969389 | 391.4896341 | 143.6531328 | 510.9476405 | 105.1896405 |
| 4178 | 69.84652895 | 527.8687514 | 134.5334345 | 640.2250757 | 119.9461864 |
| 45 | 69.83517309 | 120.9649065 | 88.26258123 | 186.4908089 | 67.03141815 |
| 1454 | 69.83 | 155.56 | 72.94 | 98.16 | 40.12 |
| 25379 | 69.81830631 | 91.36952894 | 33.44083062 | 67.37191422 | 14.99700037 |
| 11692 | 69.79192064 | 1135.765908 | 414.4834877 | 1546.524472 | 408.082855 |
| 19086 | 69.76970992 | 146.2982894 | 67.62426161 | 91.90156365 | 25.40768257 |
| 17447 | 69.71510162 | 757.1092798 | 315.0026535 | 1014.03074 | 248.7855862 |
| 5497 | 69.70658473 | 618.3891525 | 241.8729868 | 823.9281494 | 151.3202488 |
| 23194 | 69.65498238 | 62.69622659 | 24.81693426 | 41.16752769 | 22.21797666 |
| 19 | 69.62943171 | 426.8830038 | 118.6334492 | 336.4255709 | 62.63947723 |
| 11849 | 69.60087507 | 948.1751709 | 279.8387309 | 737.4883024 | 123.97332 |
| 3465 | 69.59753511 | 210.0319804 | 70.48668178 | 271.4668918 | 62.44793967 |
| 1993 | 69.59519714 | 43.10184781 | 30.86190782 | 20.51127087 | 10.4903739 |
| 22662 | 69.52 | 107.46 | 29.01 | 136.36 | 29.33 |
| 18452 | 69.51754313 | 321.3878641 | 118.9110657 | 424.391574 | 94.62603068 |
| 17324 | 69.50618727 | 312.5926635 | 107.1245732 | 383.7679626 | 72.29693664 |
| 744 | 69.50602027 | 282.8384135 | 77.81116212 | 353.1333504 | 70.01135148 |
| 19943 | 69.50318131 | 284.2980177 | 126.3869505 | 383.928817 | 104.8721705 |
| 13930 | 69.50084334 | 214.9089308 | 153.331537 | 106.240643 | 42.57434118 |
| 22539 | 69.47729664 | 36.74107571 | 37.02283507 | 67.50720611 | 37.70265225 |
| 16476 | 69.46894674 | 661.9654825 | 207.0570396 | 807.3400046 | 148.2467882 |
| 20753 | 69.46059685 | 146.9881391 | 38.9952964 | 114.6096864 | 22.23178425 |
| 7197 | 69.38344383 | 282.3300938 | 150.9619233 | 170.1503853 | 54.40399664 |
| 556 | 69.38260884 | 55.50132335 | 17.48087181 | 75.27571431 | 24.04221562 |
| 4198 | 69.32015163 | 622.3402992 | 199.7713179 | 799.2132627 | 160.4720245 |
| 3244 | 69.30595681 | 95.06917614 | 31.63411195 | 119.81669 | 24.27866027 |
| 23063 | 69.28291111 | 328.2658823 | 83.6090783 | 404.561604 | 68.57292929 |
| 24264 | 69.24567058 | 26.11217385 | 22.43333372 | 43.28478863 | 18.55868879 |
| 2153 | 69.23765468 | 324.5935101 | 302.8245339 | 143.8406632 | 45.13859767 |
| 5496 | 69.23448172 | 508.9524014 | 208.9382494 | 686.2856793 | 135.7152932 |
| 4529 | 69.23130876 | 67.85449471 | 27.85368995 | 90.38311629 | 24.2100319 |
| 22352 | 69.21 | 240.63 | 198.59 | 129.55 | 52.38 |
| 22537 | 69.21410798 | 218.5350397 | 146.7680792 | 320.5449701 | 127.5696536 |
| 1430 | 69.19139627 | 91.40795716 | 91.79231802 | 157.3163186 | 82.8694698 |
| 12276 | 69.14563885 | 146.8290814 | 72.19394428 | 197.3180931 | 55.12187566 |
| 408 | 69.14246589 | 130.3805348 | 67.27728587 | 191.4580768 | 65.83246181 |
| 14184 | 69.13444999 | 138.8526752 | 74.21831436 | 90.86184089 | 35.50680695 |
| 5837 | 69.05412401 | 707.5200515 | 227.3360419 | 877.5856354 | 176.1594803 |
| 19152 | 69.04293515 | 209.4889223 | 82.42495052 | 150.4710597 | 37.99742228 |
| 24648 | 69.01371053 | 23.19157675 | 11.6951982 | 35.71395341 | 12.84500013 |
| 291 | 68.98264892 | 188.6257241 | 56.90927233 | 232.0130777 | 38.28705897 |
| 409 | 68.87944423 | 803.4588849 | 193.8990371 | 969.1247908 | 164.618582 |
| 20816 | 68.79995324 | 595.8358273 | 369.9222458 | 370.4656146 | 83.63140389 |
| 20449 | 68.79711428 | 100.4900488 | 132.9211559 | 33.15487613 | 21.87043029 |
| 23445 | 68.77089561 | 516.3551752 | 187.237735 | 686.2066418 | 139.3621424 |
| 17494 | 68.73933301 | 185.7094369 | 45.48548725 | 223.0254103 | 37.74558387 |
| 24438 | 68.73064912 | 114.0695333 | 42.85206114 | 148.9829095 | 36.09924566 |
| 20817 | 68.72 | 1865.76 | 1135.85 | 1150.17 | 447.11 |
| 25705 | 68.6853927 | 571.3566592 | 176.4043974 | 451.9728048 | 76.32131489 |
| 20414 | 68.68171874 | 85.25065547 | 29.1778343 | 114.5185098 | 31.66919651 |
| 1712 | 68.61658957 | 209.6897328 | 68.60632447 | 160.3879218 | 35.87902845 |
| 13846 | 68.60523371 | 999.5515778 | 297.3365691 | 776.9704191 | 122.9631955 |
| 18301 | 68.5671582 | 62.34075661 | 33.80497723 | 100.8072372 | 42.70710806 |
| 18070 | 68.56181426 | 29.36749701 | 21.99959698 | 48.21170897 | 19.38594154 |
| 15191 | 68.53075266 | 3290.474496 | 1751.223512 | 2180.500127 | 805.9269968 |
| 17473 | 68.52507473 | 517.999113 | 161.8598317 | 427.536449 | 71.9934835 |
| 21053 | 68.51839482 | 66.73426419 | 31.71787962 | 102.8261937 | 48.28425026 |
| 22196 | 68.4878342 | 63.01977878 | 25.81558037 | 44.76996899 | 14.72142187 |
| 14309 | 68.45844258 | 112.8770993 | 71.13031295 | 191.135603 | 83.9940291 |
| 18741 | 68.45560361 | 22.45924623 | 9.465804661 | 31.42492016 | 12.24548318 |
| 18011 | 68.45359964 | 55.32740853 | 47.59398519 | 21.92483457 | 18.1624083 |
| 17269 | 68.45025968 | 556.6625611 | 223.6922613 | 748.9429353 | 194.3156688 |
| 4589 | 68.42738097 | 1175.409579 | 346.4630047 | 1472.99309 | 302.8077957 |
| 19469 | 68.41903108 | 301.3400452 | 113.0311594 | 382.8696906 | 90.3486576 |
| 21145 | 68.41853008 | 166.4457933 | 59.78209152 | 210.9753547 | 64.34239489 |
| 20780 | 68.39882433 | 441.7507389 | 191.5473306 | 567.4880409 | 192.6094197 |
| 1214 | 68.38179055 | 128.3025451 | 68.13347663 | 158.5489338 | 45.71421849 |
| 755 | 68.37845059 | 34.87466691 | 29.79373274 | 64.08006595 | 34.39363901 |
| 16006 | 68.36492377 | 71.88449213 | 53.75743963 | 35.40098018 | 17.41759455 |
| 14138 | 68.33603313 | 60.32285477 | 26.70754215 | 75.29445347 | 17.84433561 |
| 15851 | 68.32785024 | 317.1865116 | 273.6873358 | 160.1095765 | 75.57569123 |
| 21061 | 68.32 | 67.94 | 30.57 | 46.71 | 18.28 |
| 23783 | 68.29294768 | 395.5367742 | 88.22790322 | 467.9801054 | 73.38152003 |
| 15185 | 68.29 | 234.32 | 137.00 | 142.70 | 43.80 |
| 8210 | 68.29010872 | 744.1044707 | 212.872552 | 921.2790683 | 180.1467716 |
| 17104 | 68.25904711 | 595.24177 | 185.1588591 | 458.2361879 | 73.95955511 |
| 17999 | 68.24986223 | 901.7089805 | 380.2928546 | 1228.53441 | 405.2247232 |
| 18190 | 68.24719026 | 182.2505082 | 61.26301134 | 229.5060244 | 48.58869963 |
| 22602 | 68.22998948 | 241.7042791 | 126.4784222 | 348.9579426 | 102.9813519 |
| 9082 | 68.21328969 | 53.72565077 | 28.46924103 | 38.09238567 | 10.55678356 |
| 16012 | 68.18473305 | 93.81377915 | 55.30071228 | 58.55860103 | 14.99778497 |
| 14989 | 68.13580268 | 631.4437331 | 150.7953416 | 512.7063086 | 97.02311395 |
| 3987 | 68.09589018 | 229.0363328 | 70.16578864 | 180.4561841 | 37.27169908 |
| 23837 | 68.09 | 121.06 | 52.18 | 85.23 | 27.33 |
| 8317 | 68.06 | 1149.89 | 388.88 | 1428.19 | 346.12 |
| 15302 | 68.04929777 | 20.3076197 | 8.692629328 | 27.81934381 | 10.23548138 |
| 18001 | 67.99802943 | 322.9223513 | 154.3838937 | 447.9263548 | 164.826114 |
| 16649 | 67.97865767 | 147.8668375 | 84.05591013 | 97.60434066 | 32.64861331 |
| 22538 | 67.96963979 | 268.3883299 | 96.52292148 | 356.5133042 | 83.51530908 |
| 24770 | 67.9607889 | 167.8615447 | 99.9131833 | 258.4592806 | 101.0571212 |
| 23321 | 67.95544497 | 543.4812122 | 158.9463892 | 669.1827565 | 121.2762102 |
| 5297 | 67.89 | 282.49 | 103.56 | 368.51 | 102.45 |
| 1850 | 67.86 | 62.21 | 93.09 | 24.45 | 96.13 |
| 17394 | 67.81833971 | 452.0683779 | 169.8687842 | 324.7418707 | 84.03380507 |
| 13974 | 67.81282878 | 486.1960174 | 343.7799181 | 277.9765889 | 70.48364801 |
| 16204 | 67.80698385 | 1040.091921 | 276.0342753 | 829.9462579 | 117.9912852 |
| 17541 | 67.78 | 1031.81 | 707.66 | 671.17 | 173.64 |
| 12031 | 67.78126618 | 168.7845658 | 59.30153211 | 130.3205806 | 25.6922294 |
| 23047 | 67.77224829 | 56.55080604 | 20.02279821 | 70.52393306 | 16.27808767 |
| 20818 | 67.76991032 | 1218.483928 | 808.490787 | 683.4443517 | 312.9826702 |
| 25718 | 67.7640654 | 500.4365747 | 141.4001347 | 404.9703762 | 60.84572176 |
| 21657 | 67.74970358 | 540.3602663 | 166.2162285 | 426.2383025 | 80.58986325 |
| 6055 | 67.74953658 | 852.9112049 | 291.949659 | 1087.752099 | 221.2048224 |
| 825 | 67.72899584 | 33.81589022 | 15.82849621 | 49.46192808 | 17.8340854 |
| 5838 | 67.71229605 | 538.5143205 | 169.6443258 | 674.9497738 | 122.9308275 |
| 17175 | 67.70394616 | 829.2548848 | 224.8030928 | 660.0175001 | 115.4189706 |
| 16726 | 67.70377916 | 870.2897617 | 304.5065136 | 1099.441777 | 185.69785 |
| 1546 | 67.7007732 | 196.1735398 | 73.15499669 | 253.3459783 | 55.85865002 |
| 17744 | 67.69208931 | 46.14572439 | 26.53139174 | 64.03176308 | 23.43213839 |
| 18361 | 67.6610277 | 621.8671848 | 267.2018135 | 448.8817377 | 121.6090859 |
| 4451 | 67.64933785 | 238.855669 | 88.60178484 | 300.3323635 | 63.64516262 |
| 18396 | 67.6296321 | 90.02171091 | 44.79575334 | 61.70407738 | 16.44084885 |
| 2554 | 67.62946511 | 57.15798904 | 20.53670721 | 42.64349823 | 12.30989757 |
| 15190 | 67.61810925 | 3108.275869 | 1723.862361 | 1862.426944 | 876.4994172 |
| 18606 | 67.59239158 | 847.3774987 | 254.5206766 | 660.8042777 | 115.149482 |
| 15295 | 67.57 | 171.07 | 70.81 | 126.38 | 31.75 |
| 770 | 67.50905963 | 701.6100581 | 282.7824207 | 933.1963529 | 236.566298 |

[0285] TABLE 5N

| GLGC Identifier | PLS_Score |
|---|---|
| 25024 | −0.03408754 |
| 21011 | 0.005158207 |
| 8317 | 0.00286913 |
| 15861 | 0.01758436 |
| 15862 | 0.01155703 |
| 15028 | −0.04786289 |
| 15154 | 0.01881327 |
| 15296 | 0.00676223 |
| 16518 | 0.02598835 |
| 17764 | −0.02342505 |
| 20711 | −0.01317801 |
| 23778 | 0.002304377 |
| 20795 | 0.00146821 |
| 20817 | 0.0314257 |
| 20833 | −0.004259089 |
| 20919 | −0.0198629 |
| 20920 | −0.007400703 |
| 21012 | −0.003223273 |
| 22351 | −0.008960611 |
| 15848 | −0.01718595 |
| 15849 | −0.04416249 |
| 15850 | −0.01030871 |
| 23837 | −0.0118801 |
| 4312 | 0.003691487 |
| 20864 | 0.007678122 |
| 10241 | 0.01076413 |
| 11434 | 0.06352768 |
| 20801 | −0.01583562 |
| 15126 | −0.002417698 |
| 15297 | −0.006103148 |
| 15124 | 0.01198701 |
| 16080 | 0.02010419 |
| 21013 | −0.001557214 |
| 13479 | −0.03089779 |
| 13480 | 0.003500852 |
| 6780 | −0.003917337 |
| 18989 | 0.000967733 |
| 1475 | 0.01773045 |
| 1321 | −0.03506051 |
| 11955 | 0.02492273 |
| 1920 | 0.01128843 |
| 15189 | −0.005276864 |
| 17765 | −0.02927309 |
| 4010 | 0.0263635 |
| 23225 | 0.01153367 |
| 11956 | −0.009530467 |
| 11755 | −0.03076732 |
| 20713 | 0.02154138 |
| 25057 | 0.01553224 |
| 17378 | −0.008536189 |
| 14956 | 0.00635737 |
| 14957 | −0.008478985 |
| 16468 | 0.01178596 |
| 5733 | 0.01442401 |
| 4748 | 0.00604811 |
| 4749 | −0.001180088 |
| 17758 | −0.01322739 |
| 1301 | −0.03655559 |
| 15125 | −0.005030922 |
| 17541 | 0.01180132 |
| 6406 | 0.008492458 |
| 1598 | 0.03642105 |
| 17805 | −0.01636465 |
| 1537 | −0.02368897 |
| 16768 | 0.005025752 |
| 17158 | −0.006618596 |
| 1037 | −0.03482728 |
| 17377 | 0.009030169 |
| 8664 | 0.005364025 |
| 15569 | −0.01163379 |
| 15408 | −0.004117654 |
| 15409 | 0.02009719 |
| 4615 | −0.0216485 |
| 16148 | −0.007715343 |
| 21078 | −0.002250057 |
| 23109 | 0.005140497 |
| 25064 | −0.02576101 |
| 1466 | −0.0115101 |
| 15741 | 0.001858723 |
| 13723 | −0.03098842 |
| 1183 | 0.007847724 |
| 1174 | −0.02682282 |
| 1814 | −0.02409571 |
| 23445 | 0.01268358 |
| 25069 | −0.01803054 |
| 25070 | −0.001117053 |
| 1247 | 0.002905345 |
| 17301 | 0.02169327 |
| 14346 | 0.01814763 |
| 15017 | −0.005796293 |
| 634 | 0.02392324 |
| 17806 | −0.03059827 |
| 15174 | 0.02558445 |
| 20887 | 0.003184597 |
| 20818 | 0.03540093 |
| 33 | 0.000687164 |
| 23523 | 0.04827108 |
| 1853 | 0.000184702 |
| 23987 | −0.009158069 |
| 21651 | −0.01072442 |
| 635 | 0.01430005 |
| 14347 | 0.007348958 |
| 25098 | 0.01413377 |
| 17157 | 0.002967211 |
| 17337 | 0.03499423 |
| 15703 | 0.003194804 |
| 15662 | −0.01996508 |
| 13973 | 0.01031566 |
| 18075 | 0.001804553 |
| 18076 | 0.01474427 |
| 4234 | −0.03231172 |
| 23625 | 0.008422249 |
| 15243 | −0.009537201 |
| 25165 | 0.004905388 |
| 3454 | −0.01269925 |
| 23045 | −0.01042821 |
| 17326 | −0.01356372 |
| 17327 | −0.01550095 |
| 22603 | 0.01994649 |
| 117 | −0.01073836 |
| 16649 | −0.003848922 |
| 985 | −0.004571139 |
| 4011 | 0.02594932 |
| 16007 | −0.03245922 |
| 16155 | −0.03767058 |
| 25198 | −0.04053008 |
| 744 | 0.01448024 |
| 5496 | −1.62254E−05 |
| 5497 | −0.004547023 |
| 25204 | 0.01864999 |
| 17535 | 0.01886001 |
| 16156 | −0.01055435 |
| 4723 | −0.02257333 |
| 2367 | 0.00281055 |
| 2368 | 0.0198073 |
| 6554 | −0.01628744 |
| 12422 | −0.003597185 |
| 12423 | −0.01363361 |
| 25247 | 0.02928529 |
| 20404 | −0.003382577 |
| 18956 | −0.03746372 |
| 2554 | 0.001275564 |
| 3254 | −0.02432042 |
| 4003 | −0.01871112 |
| 25257 | −0.006161937 |
| 15281 | −0.02035118 |
| 1214 | 0.01756383 |
| 18727 | −0.01572102 |
| 18246 | 0.001154571 |
| 18452 | −0.01337099 |
| 18453 | −0.007857254 |
| 20493 | 0.01936436 |
| 5492 | −0.01191286 |
| 18028 | −0.03629819 |
| 1354 | 0.009908063 |
| 25290 | 0.02397325 |
| 20494 | −0.000954101 |
| 18750 | −0.02634051 |
| 25315 | −0.03588133 |
| 3987 | 0.009837479 |
| 20149 | −0.04258657 |
| 22412 | −0.004335643 |
| 22413 | −0.00221225 |
| 109 | −0.005122522 |
| 22411 | 0.01450058 |
| 455 | −0.01210526 |
| 25405 | 0.01309029 |
| 20298 | −0.05332408 |
| 1622 | −0.003529147 |
| 21882 | 0.006960723 |
| 7872 | −0.01691339 |
| 24615 | −0.003635782 |
| 25460 | −0.007971963 |
| 25467 | −0.002433017 |
| 25468 | 0.009742874 |
| 25469 | −0.01432337 |
| 16449 | −0.000927568 |
| 16450 | 0.004114473 |
| 5837 | −0.005018729 |
| 25480 | 0.006534462 |
| 25481 | 0.03633816 |
| 4012 | 0.02058364 |
| 10886 | −0.02500923 |
| 5493 | −0.00559364 |
| 15127 | 0.01913647 |
| 14003 | 0.00302135 |
| 355 | 0.001723895 |
| 356 | −0.01191485 |
| 16248 | 0.02829451 |
| 15832 | −0.003373712 |
| 1471 | −0.007821926 |
| 18647 | −0.00834588 |
| 25518 | −0.01890072 |
| 9224 | −0.009229792 |
| 15135 | 0.03026445 |
| 25525 | 0.01468858 |
| 18990 | 0.002379164 |
| 16211 | −0.01861134 |
| 1943 | 0.01443373 |
| 25545 | −0.02041409 |
| 21583 | −0.000591347 |
| 25546 | −0.006230616 |
| 10260 | −0.002039004 |
| 25563 | −0.009749564 |
| 14121 | −0.01940992 |
| 3609 | 0.0020902 |
| 18005 | −0.000341325 |
| 16268 | −0.05654464 |
| 22196 | 0.01060633 |
| 12014 | 0.006231096 |
| 16708 | 0.01482556 |
| 16398 | 0.006464105 |
| 25632 | 0.03466999 |
| 4957 | 0.008092677 |
| 25643 | −0.03402377 |
| 23300 | 0.03958223 |
| 1546 | 0.01170207 |
| 22675 | −0.008282468 |
| 818 | −0.01053171 |
| 1550 | 0.01494726 |
| 1551 | 0.02599436 |
| 20715 | 0.01030098 |
| 16947 | 0.02858744 |
| 20884 | −0.02730658 |
| 24778 | −0.02842167 |
| 25675 | −0.0203886 |
| 20810 | −0.02795083 |
| 15653 | −0.00909295 |
| 25676 | −0.04245567 |
| 19244 | 0.01925244 |
| 1069 | 0.02009015 |
| 3202 | 0.01047109 |
| 25682 | −0.03644181 |
| 25686 | 0.01175157 |
| 20872 | 0.005200382 |
| 15201 | 0.01743058 |
| 9620 | 0.009678062 |
| 20427 | −0.007203343 |
| 25691 | −0.01287446 |
| 25699 | −0.01975985 |
| 10860 | −0.01890404 |
| 10267 | −0.01660402 |
| 5667 | 0.003279787 |
| 18611 | −0.01685318 |
| 17175 | 0.008473313 |
| 25702 | 0.006244145 |
| 10109 | 0.005310704 |
| 25707 | 0.03233485 |
| 15875 | 0.002634939 |
| 25719 | −0.01698852 |
| 4441 | 0.01366032 |
| 13646 | 0.01512804 |
| 23708 | 0.000573755 |
| 20844 | −0.00279304 |
| 22219 | 0.003093927 |
| 16272 | −0.004407614 |
| 25770 | −0.01879616 |
| 20173 | −0.007049952 |
| 407 | 0.004526638 |
| 8663 | 0.01127171 |
| 19824 | 1.61079E−05 |
| 1921 | 0.006592317 |
| 24428 | 0.01721819 |
| 24438 | −0.00262423 |
| 18619 | 0.005152837 |
| 24496 | −0.03948592 |
| 24567 | −0.01201788 |
| 291 | −0.02495906 |
| 24770 | −0.008714317 |
| 24843 | −0.03153809 |
| 24874 | 0.02920487 |
| 18686 | 0.01941361 |
| 43 | −0.01441405 |
| 133 | 0.04627691 |
| 24590 | −0.01762193 |
| 16675 | 0.03559083 |
| 13682 | 0.003206818 |
| 417 | −0.0215943 |
| 18008 | 0.003835681 |
| 466 | −0.003738717 |
| 24639 | −0.01283457 |
| 556 | −0.004202022 |
| 714 | 0.005186919 |
| 729 | −0.003318912 |
| 770 | 0.01406266 |
| 797 | 0.01683459 |
| 912 | −0.01437363 |
| 1928 | −0.007305755 |
| 1929 | 0.01778287 |
| 16610 | 0.01123602 |
| 24648 | 0.004198686 |
| 1104 | 0.02800208 |
| 1602 | 0.01814398 |
| 8426 | −0.0182353 |
| 1203 | −0.0288901 |
| 617 | −0.008825291 |
| 11692 | 0.02179052 |
| 19997 | 0.002543063 |
| 10071 | −0.01549941 |
| 16676 | 0.0117799 |
| 19952 | 0.004150428 |
| 15379 | −0.02876546 |
| 25907 | 0.03277824 |
| 19002 | −0.01186146 |
| 19943 | 0.000162394 |
| 20082 | 0.02651264 |
| 18078 | 0.000639759 |
| 20839 | −0.000873427 |
| 4259 | 0.01316487 |
| 15385 | 0.01291856 |
| 4242 | 0.01189998 |
| 16435 | −0.000204926 |
| 16849 | 0.02508564 |
| 15022 | 0.02776678 |
| 8888 | 0.01160653 |
| 1867 | −0.00064856 |
| 24329 | −0.03123893 |
| 1729 | −0.03759896 |
| 9541 | −0.03444796 |
| 21696 | 0.009596217 |
| 20812 | 0.0196699 |
| 13938 | −0.01164793 |
| 15434 | −0.006764275 |
| 15097 | 0.001716813 |
| 23362 | −0.0179409 |
| 17473 | −0.01096604 |
| 15616 | 0.001493839 |
| 18713 | 0.01234178 |
| 815 | −0.02093439 |
| 15247 | 0.01110444 |
| 21950 | 0.000306391 |
| 21682 | −0.006126722 |
| 20802 | −0.01220903 |
| 23709 | 0.02399753 |
| 16510 | 0.03670125 |
| 4449 | −0.00546298 |
| 18077 | 0.0171604 |
| 17160 | 0.01415535 |
| 2109 | −0.005310179 |
| 15190 | −0.01250142 |
| 16918 | −0.01725919 |
| 23660 | −0.01086482 |
| 8749 | −0.03118036 |
| 18687 | 0.003382211 |
| 21975 | 0.01300874 |
| 21842 | 0.001369081 |
| 15191 | 0.01105956 |
| 20717 | 0.01063375 |
| 3431 | −0.006921202 |
| 17570 | 0.007088764 |
| 15259 | −0.01822124 |
| 17563 | −0.02220618 |
| 17829 | 0.005354438 |
| 16081 | 0.0205121 |
| 1474 | −0.03084054 |
| 17448 | 0.02467472 |
| 9125 | −0.01139344 |
| 17196 | −0.06969452 |
| 8212 | 0.02652411 |
| 20702 | 0.002678285 |
| 573 | −0.02872789 |
| 409 | −0.007299354 |
| 4574 | −0.02958615 |
| 754 | −0.0157468 |
| 15468 | 0.000192713 |
| 12700 | −0.01010274 |
| 14124 | −0.01342113 |
| 20126 | 0.0146427 |
| 4450 | −0.04028917 |
| 4451 | −0.04007754 |
| 17197 | 0.02424782 |
| 17198 | 0.033739 |
| 16726 | 0.01229342 |
| 23698 | 0.01072602 |
| 23699 | 0.005510382 |
| 1540 | 0.02953147 |
| 19255 | −0.02175437 |
| 19256 | −0.047948 |
| 20405 | 0.02330483 |
| 20885 | −0.003796437 |
| 46 | 0.01204979 |
| 6055 | −0.01505172 |
| 14997 | −0.01111345 |
| 24563 | 0.002454691 |
| 24564 | −0.01268496 |
| 24651 | −0.0234343 |
| 240 | −0.01207596 |
| 10878 | −0.05290645 |
| 17105 | 0.02110802 |
| 1514 | 0.007158728 |
| 15112 | −0.007915743 |
| 24900 | 0.000776591 |
| 9109 | 0.02180698 |
| 1427 | −0.01731983 |
| 16683 | −0.02202782 |
| 3549 | −0.002275369 |
| 23524 | 0.02175325 |
| 19825 | 0.001300221 |
| 18958 | −0.009980402 |
| 20803 | −0.01980488 |
| 16871 | −0.02941303 |
| 12606 | −0.006382196 |
| 1970 | −0.00636348 |
| 23826 | −0.001208646 |
| 20925 | 0.01287874 |
| 20780 | −0.009828659 |
| 16895 | −0.01042923 |
| 1424 | 0.01814117 |
| 20481 | −2.73489E−05 |
| 1542 | 0.01467805 |
| 17226 | 0.04658792 |
| 17227 | 0.03661337 |
| 1479 | −0.02727375 |
| 1558 | 0.001784993 |
| 1559 | −0.00440292 |
| 20753 | 0.000428273 |
| 20865 | −0.02611805 |
| 1306 | 0.01473606 |
| 19543 | 0.01029956 |
| 15872 | 0.006396827 |
| 24640 | 0.02250593 |
| 20597 | −0.0072339 |
| 439 | 0.002488504 |
| 20518 | −0.008984546 |
| 12903 | 0.007889638 |
| 21562 | 0.002491812 |
| 10248 | 0.03579842 |
| 23606 | −0.000202168 |
| 21122 | 0.005247012 |
| 21123 | 0.01623291 |
| 570 | 0.0196455 |
| 16847 | 0.01145459 |
| 16204 | 0.02414009 |
| 16205 | 0.008361849 |
| 23854 | −0.01483347 |
| 24626 | −0.0146705 |
| 1885 | −0.01965638 |
| 13940 | 0.000886116 |
| 18108 | −0.005199345 |
| 646 | −0.05841963 |
| 20513 | 0.02871836 |
| 20483 | 0.002659336 |
| 11849 | 0.01031365 |
| 1977 | 0.000325571 |
| 20772 | 0.01157497 |
| 16448 | −0.01863292 |
| 18107 | 0.0166564 |
| 755 | −0.03462439 |
| 16681 | 0.0152882 |
| 4198 | 0.02822708 |
| 4199 | 0.004798302 |
| 16147 | 0.01038541 |
| 17554 | −0.02472233 |
| 16354 | 0.02817476 |
| 945 | 0.00993543 |
| 989 | −0.01391793 |
| 16407 | −0.000955995 |
| 7914 | 0.000102491 |
| 1419 | −0.04516254 |
| 24885 | 0.01988852 |
| 7064 | −0.005395484 |
| 17149 | 0.02755652 |
| 17150 | 0.03952128 |
| 17393 | −0.005221711 |
| 17394 | −0.00579925 |
| 1508 | −0.0102906 |
| 17284 | −0.007007458 |
| 17285 | 0.0214901 |
| 18501 | 0.02471658 |
| 18502 | −0.03477159 |
| 4589 | −0.000894857 |
| 18597 | 0.005855973 |
| 4594 | −0.01689378 |
| 16444 | 0.02065756 |
| 20809 | −0.02390898 |
| 15411 | 0.01785927 |
| 4467 | 0.01709855 |
| 18070 | 0.01584395 |
| 7488 | −0.02057392 |
| 24643 | −0.001264686 |
| 1509 | 0.00454317 |
| 13005 | −0.006822573 |
| 1894 | −0.00274857 |
| 4254 | −0.01411081 |
| 1762 | −0.01280683 |
| 1763 | −0.003490757 |
| 7784 | 0.002189607 |
| 23961 | −0.005958063 |
| 20868 | −0.01507699 |
| 20869 | −0.009079757 |
| 20699 | 0.00043838 |
| 20700 | −0.004172502 |
| 11153 | −0.02787509 |
| 16948 | −0.003215995 |
| 1678 | 0.000367942 |
| 1976 | 0.01736856 |
| 17502 | 0.01984278 |
| 17661 | −0.008856236 |
| 15580 | −0.02737185 |
| 17411 | −0.004684325 |
| 4178 | 0.00538893 |
| 15150 | −0.007069793 |
| 11852 | −0.000403569 |
| 4809 | −0.03041049 |
| 19067 | −0.007720506 |
| 20582 | −0.04267649 |
| 22374 | −0.01256255 |
| 22927 | −0.03448938 |
| 4222 | −0.0165522 |
| 7090 | −0.02020823 |
| 15927 | 6.41932E−05 |
| 11865 | −0.006393904 |
| 19402 | −0.04323217 |
| 16139 | −0.009440685 |
| 6451 | 0.006511471 |
| 16419 | −0.01146098 |
| 18084 | −0.01723762 |
| 15371 | −0.01097884 |
| 15376 | −0.008551695 |
| 15887 | −0.0465706 |
| 15888 | −0.007077734 |
| 15401 | 0.03108703 |
| 18902 | −0.003807752 |
| 15505 | 0.02092673 |
| 6153 | 0.005509851 |
| 4361 | −0.000569115 |
| 4386 | 0.02562726 |
| 24235 | 0.000464768 |
| 9952 | −0.009126578 |
| 9071 | −0.000939401 |
| 474 | −0.01146703 |
| 9091 | −0.0287723 |
| 17420 | 0.002994313 |
| 11959 | 0.01476976 |
| 17693 | 0.01033417 |
| 17289 | −0.003851629 |
| 17290 | 0.01185756 |
| 20522 | 0.000628409 |
| 20523 | 0.003173917 |
| 17249 | −0.02066336 |
| 16023 | 0.006094849 |
| 17779 | −0.000918023 |
| 1159 | 0.01132209 |
| 17630 | 0.009499276 |
| 13420 | 0.005331431 |
| 14595 | 0.02173968 |
| 16529 | −0.0408304 |
| 4482 | 0.03541986 |
| 4484 | 0.02414248 |
| 18190 | 0.02839109 |
| 17717 | 0.01780007 |
| 9027 | 0.01143368 |
| 13647 | 0.001145029 |
| 820 | −0.02052028 |
| 12016 | 0.004811067 |
| 21695 | 0.005617932 |
| 4499 | 0.00030477 |
| 8599 | 0.01191982 |
| 12275 | 0.004126427 |
| 12276 | 0.006840609 |
| 18274 | 0.000625962 |
| 18275 | −0.006242172 |
| 4512 | 0.01254979 |
| 15876 | 0.0076095 |
| 17500 | −0.02208598 |
| 23783 | −0.003488245 |
| 13542 | −0.001915889 |
| 22539 | 0.006842911 |
| 23322 | −0.002697228 |
| 12848 | −0.01525511 |
| 3853 | 0.02945047 |
| 3439 | −0.01804814 |
| 12020 | 0.01677873 |
| 3870 | 0.007775934 |
| 548 | 0.01829203 |
| 17752 | 0.01777645 |
| 18967 | −0.03837527 |
| 7505 | 0.00383637 |
| 9084 | −0.02018928 |
| 10540 | 0.02506434 |
| 3895 | −0.01868215 |
| 18396 | 0.01085198 |
| 18291 | 0.01498073 |
| 23063 | −0.002563515 |
| 18361 | 0.01949046 |
| 14309 | 0.002836866 |
| 21007 | −0.003881654 |
| 23203 | 0.001480229 |
| 4412 | 0.01905504 |
| 21035 | −0.01397706 |
| 18462 | −0.0280539 |
| 22386 | 0.01780035 |

1. A method of predicting at least one toxic effect of a compound, comprising:
(a) preparing a gene expression profile of a kidney tissue or cell sample exposed to the compound; and
(b) comparing the gene expression profile to a database comprising at least part of the data or information of Tables 5A-5N.

2. A method of claim 1, wherein the gene expression profile prepared from the tissue or cell sample comprises the level of expression for at least one gene.

3. A method of claim 1, wherein the kidney tissue or cell sample is derived from human tissue or cells.

4. A method of claim 2, wherein the level of expression is compared to a Tox Group Mean and/or Non-Tox Group Mean value in Tables 5A-5M.

5. A method of claim 4, wherein the level of expression is normalized prior to comparison.

6. A method of claim 2, wherein the gene expression level is a fold-change value calculated by an RMA algorithm.

7. A method of claim 6, wherein a prediction score is calculated for the tissue or cell sample, comprising:
a) multiplying the fold-change value for at least two genes in the gene expression profile by a PLS score from the database for the at least two genes; and
b) summing the products.

8. A method of claim 7, further comprising:
a) comparing the prediction score to a cut-off prediction score for a toxicity database, wherein a sample prediction score greater than or equal to the cut-off prediction score is indicative of a toxic response.

9. A method of claim 7, wherein the database PLS score for each gene is obtained from Table 5N.

10. A method of claim 1, wherein the database comprises nearly all of the data or information in Tables 5A-5N.

11. A method of predicting at least one toxic effect of a compound, comprising:
(a) detecting the level of expression in a tissue or cell sample exposed to the compound of two or more genes from Tables 1-5N; wherein differential expression of the genes in Tables 1-5N compared to a control is indicative of at least one toxic effect.

12. A method of predicting the progression of a toxic effect of a compound, comprising:
(a) detecting the level of expression in a tissue or cell sample exposed to the compound of two or more genes from Tables 1-5N; wherein differential expression of the genes in Tables 1-5N compared to a control is indicative of toxicity progression.

13. A method of claim 11, wherein the toxic effect is renal toxicity.

14. A method of identifying an agent that modulates the onset or progression of a toxic response, comprising:
(a) exposing a cell to the agent and a known toxin; and
(b) detecting the expression level of two or more genes from Tables 1-5N; wherein differential expression of the genes in Tables 1-5N compared to a control is indicative of toxicity.

15. A method of predicting the cellular pathways that a compound modulates in a cell, comprising:
(a) detecting the level of expression in a tissue or cell sample exposed to the compound of two or more genes from Tables 1-5N; wherein differential expression of the genes in Tables 1-5N compared to a control is associated the modulation of at least one cellular pathway.

16. A method of claim 11, wherein the compound exposure is in vivo.

17. A method of claim 11, wherein the level of expression is detected by an amplification or hybridization assay.

18. A method of claim 17, wherein the amplification assay is quantitative or semiquantitative PCR.

19. A method of claim 17, wherein the hybridization assay is selected from the group consisting of Northern blot, dot or slot blot, nuclease protection and microarray assays.

20. The method of claim 11, wherein the expression levels of at least 5 genes are detected.

21. The method of claim 11, wherein the expression levels of at least 10 genes are detected.

22. The method of claim 11, wherein the expression levels of at least 25 genes are detected.

23. The method of claim 11, wherein the expression levels of at least 30 genes are detected.

24. The method of claim 11, wherein the expression levels of at least 50 genes are detected.

25. The method of claim 11, wherein the expression levels of at least 75 genes are detected.

26. The method of claim 11, wherein the expression levels of at least 100 genes are detected.

27. The method of claim 11, wherein the two or more genes are rat genes.

28. A method of claim 11, wherein the effect is selected from the group consisting of renal tubule toxicity, renal tubule obstruction, glomerular injury and toxicity to the S2 segment of the proximal tubule.

29. A method of claim 13, wherein the renal toxicity is associated with at least one kidney disease pathology selected from the group consisting of renal tubule toxicity, renal tubule obstruction, glomerular injury and toxicity to the S2 segment of the proximal tubule.

30. A method of claim 15, wherein the cellular pathway is modulated by a compound selected from the group consisting of acyclovir, adriamycin, amphotericin, BEA, carboplatin, carbon tetrachloride, cephaloridine, chloroform, cidofovir, ciprofibrate, cisplatin, colchicine, cyclophosphamide, cyclosporine A, dantrolene, diclofenac, diflunisal, ethylene glycol, gentamicin, hexachloro-1,3-butadiene, hydralazine, ifosfamide, indomethacin, lithium chloride, meloxicam, menadione, mercuric chloride, olsalazine, puromycin aminonucleoside (PAN), pentamidine, phenacetin, propyleneimine, semustine, sodium chromate, sodium oxalate, sulfadiazine, suramin, tacrolimus, thioacetamide, vancomycin, AY-25329, cephalosporine, citrinin, hexachloro-1,3-butadiene and pamindronate.

31. A set of at least two probes, wherein each of the probes comprises a sequence that specifically hybridizes to a gene in Tables 1-5N.

32. A set of probes according to claim 31, wherein the set comprises probes that hybridize to at least 10 genes.

33. A set of probes according to claim 31, wherein the set comprises probes that hybridize to at least 25 genes.

34. A set of probes according to claim 31, wherein the set comprises probes that hybridize to at least 50 genes.

35. A set of probes according to claim 31, wherein the set comprises probes that hybridize to at least 100 genes.

36. A set of probes according to claim 31, wherein the probes are attached to a solid support.

37. A set of probes according to claim 36, wherein the solid support is selected from the group consisting of a membrane, a glass support and a silicon support.

38. A solid support comprising at least two probes, wherein each of the probes comprises a sequence that specifically hybridizes to a gene in Tables 1-5N.

39. A solid support of claim 38, wherein the gene is a rat gene.

40. A solid support of claim 38, wherein the array comprises at least about 100 different oligonucleotides in discrete locations per square centimeter.

41. A solid support of claim 38, wherein the array comprises at least about 1000 different oligonucleotides in discrete locations per square centimeter.

42. A solid support of claim 38, wherein the array comprises at least about 10,000 different oligonucleotides in discrete locations per square centimeter.

43. A computer system comprising:
(a) a database containing information related to the expression level in a tissue or cell sample exposed to a renal toxin of a set of genes comprising at least two genes in Tables 1-5N; and
(b) a user interface to access, recover or view the information.

44. A computer system of claim 43, wherein the database further comprises sequence information for the genes.

45. A computer system of claim 43, wherein the database further comprises information identifying the expression level for the set of genes in the tissue or cell sample before exposure to a renal toxin.

46. A computer system of claim 43, wherein the database further comprises information identifying the expression level of the set of genes in a tissue or cell sample exposed to at least a second renal toxin.

47. A computer system of claim 43, further comprising records including descriptive information from an external database, which information correlates said genes to records in the external database.

48. A computer system of claim 47, wherein the external database is GenBank.

49. A method of using a computer system of claim 43 to present information identifying the expression level in a tissue or cell of at least one gene in Tables 1-5N, comprising:
comparing the expression level of at least one gene in Tables 1-5N in a tissue or cell exposed to a test compound to the level of expression of said gene after exposure to the test compound in the database.

50. A method of claim 49, wherein the expression levels of at least 10 genes are compared.

51. A method of claim 49, wherein the expression levels of at least 50 genes are compared.

52. A method of claim 49, wherein the expression levels of at least 100 genes are compared.

53. A method of claim 49, further comprising the step of displaying the level of expression of at least one gene in the tissue or cell sample compared to the expression level of said gene when exposed to a toxin.

54. A method of claim 14, wherein the known toxin is a renal toxin.

55. A method of claim 54, wherein the renal toxin is selected from the group consisting of acyclovir, adriamycin, amphotericin, BEA, carboplatin, carbon tetrachloride, cephaloridine, chloroform, cidofovir, ciprofibrate, cisplatin, colchicine, cyclophosphamide, cyclosporine A, dantrolene, diclofenac, diflunisal, ethylene glycol, gentamicin, hexachloro-1,3-butadiene, hydralazine, ifosfamide, indomethacin, lithium chloride, meloxicam, menadione, mercuric chloride, olsalazine, puromycin aminonucleoside, pentamidine, phenacetin, propyleneimine, semustine, sodium chromate, sodium oxalate, sulfadiazine, suramin, tacrolimus, thioacetamide, and vancomycin, AY-25329, cephalosporine, citrinin, hexachloro-1,3-butadiene and pamindronate.

56. A method of claim 11, wherein nearly all of the genes in Tables 1-5N are detected.

57. A method of claim 56, wherein all of the genes in at least one of Tables 5A-5N are detected.

58. A kit comprising at least one solid support of claim 38 packaged with gene expression information for said genes.

59. A kit comprising at least one solid support of claim 38 packaged with instructions for its use.

60. A kit of claim 58, wherein the gene expression information comprises gene expression levels in a tissue or cell sample exposed to a renal toxin.

61. A kit of claim 58, wherein the gene expression information comprises a PLS score for each of said genes.

62. A kit of claim 58, wherein the gene expression information is in an electronic format.

63. A method of identifying an agent that modulates at least one activity of a protein encoded by a gene in Tables 1-5N comprising:
(a) exposing the protein to the agent; and
(b) assaying at least one activity of said protein.

64. A method of claim 63, wherein the agent is exposed to a cell expressing the protein.

65. A method of claim 64, wherein the cell is exposed to a known toxin.

66. A method of claim 65, wherein the toxin modulates the expression of the protein.

67. A computer system of claim 43, wherein the genes are rat genes.

The application's sequence listing, which the Patent Office published only in electronic form, follows.

SEQUENCE LISTING (1617 sequences)

SEQ ID NO: 1 - DNA, 233 bp, Rattus norvegicus
ttttttttttcgcattttgtacatgaatgtttatttctcaattaaacattccctttaaacacaaggaatgaattctaaatcttcataaagatgaataaaaaatgatatccctccagtatagcgtgtataatcactgtccttggtcactactggcatttactgtttaacatcaaaaaacaaaggttatttaaaaatcatgctactggatttctaccccctccgctatgaccgaa

SEQ ID NO: 2 - DNA, 158 bp, Rattus norvegicus
accctttgaactagaagctttctattctgaccctcaagcagttccatatccagaagcaaaaatcggccgttttgtcgttcagaatgtttctgcacagaagatggagaaaatctaaagtgaaagtgcgcgtgacacacatgcatttcacatatccgctc

SEQ ID NO: 3 - DNA, 318 bp, Rattus norvegicus
  misc_feature (1)..(318): n = a or c or g or t
catccaacaagaagctacactttattagtgatagaaacagtacaaattttaaaccaagctgtagttccacttttcaaacaccaaaaggggggggangggggaggagggtgtccttgctgtcagataattacattgttaattccataatagcatttacaatatcgttactgtngtttttnagggctcggacagcctttgctcttgacacatttgcttgtgacatgaccaactctatgtccttaacttccacacccgtttcatcaacctcctcttcttcgntctcctcttggacagtcggcgtctgcggtgttctcctga

SEQ ID NO: 4 - DNA, 308 bp, Rattus norvegicus
  misc_feature (1)..(308): n = a or c or g or t
cggagacccccgggtgaatccaccgacaccatgtctgaccaggaggcaaaaccttcaactgaggacttaggagataagaaagaaggagaatacattaaactcaaagttattggacaggacagcagtgagatccatttcaaagtgaaaatgacaacacatctcaagaagctcaaagaatcgtactgtcaaagacagggagttccaatganttcactcaggtttctctttgaaggtcagagaattgctgataatcatactccaaaagaactgggaatggaggaagaagacgtgatttgaagtttatcagg

SEQ ID NO: 5 - DNA, 608 bp, Rattus norvegicus
taataacaagtgtacaatttagcataaggaatcggagagcctctccagagaagtcggtttctttgctgcaagaagaatgaggttctgaacccttatccaagaacagaagccatcagccaagtctccacatttctctgcaaaatgttgtagcctctataactgtatgatagtgtaatgcatgccttcagttgtaagtggccagatcgcgctacagtgacattgaaacctgctctctaattggccctgtacagtttgcttatttataaattcatttaaaacactacagctgttgaatggttacaacctacgcctccggtcctaacttcagttgttctcctcggtgtgcagccagctgttccacactgtattattgtaacttatttagtgaagtcagaagcagtagacagatgttggtgcaatacaagtattgtgtgcatttatcgtaataaagtgctccgcgtcggttcagttcctcacagcttctcacagtgcatgtctgactgtagtctgtaaatagaggtcagtgtccgtgctgctaacaggtatcgatcgcacagacatgatttcaggtaaataaatcgattctacgataaatgggtaaaagaaaa

SEQ ID NO: 6 - DNA, 619 bp, Rattus norvegicus
cccaagattaaatgattattaaaaaagcgtgccactgtatagaaatcaacattctctcccataattctgtgcattgggactatagaaatgtcactgtccctgctccacatcttcaaattaacattctcaggtcacaatagtaagtcttcccacaaggaaccttccggaaaaacaagctgtttcctcggctcatatttcccgctttttgtagcatgcaccagcaatctatccaagaagtatatattggggagtaaggaggagatccaccagcaagcccacagttgttaacagccataagattagatacaagcacaaagggatatgtcaacatactggcaaagaatcctgtgacagcttgggaataacttttcatttcattcatggtagagaccccactgtccagtgcataggtattgatgagataagccagtgagttacacagccacaaagaaatgatgtcacctaggaggcgaggaatgaggcccgcaaaaaatcctacgatgccttcttcccggtagatggttactatggagtcacacagtccgcagtacttagactctctgccgataaactgtaccatggacctcagagtaatcaccttgaagggatgtgtaatgag

SEQ ID NO: 7 - DNA, 496 bp, Rattus norvegicus
atctgtgtagaccacaggcaggtgtttgtttctggcatggccacattccagatacaagaacgtagagagacccagcaaggcaccacaccctctcatggcagagagggagcagtggggcagggtgagggccagctaataaagcctcccctcccccccttaactttgttcatagggcaaatggctgacggaaggagaaggtgggtaggttgagagggtatgcgtcaagacttggggagaggtagcagatagccgtcttgaggctctgttttcaatgagtagtcctagtcgaccttaaccaaagctccatccgattgtattcttgccaaaacacaacagacacatgcacgaacatggggcgtaagcaataatgtcctctcgtgttctccacggctgctcgaaccaagtggctggttcatttggttgacactgattcgcctttaaccatgacggttcctgttttttatttcacagaaagccaataaaattgtttagctat

SEQ ID NO: 8 - DNA, 617 bp, Rattus norvegicus
tatttaattggaatacatgtcctgccaaccaaaccataaaacacttcatgggaacccatcacacatgaaaccccagcaggaccaacaagtgcggccttgcacttgtcaaggatgctgtagaagaagaaactattgagtttccgtcttaatcctcttcagaacttgaatcatcctcttggtcagaaagttccggcacagggaagcggagaatggcagctactccagtcagctgaccaagctgttccccagacacgtggagactggagaatatccttacggtgcccgcattctctttcacactgtccaccagcctgacataccggctccgggtggccacatcctgatgccggaagagctcatcactgatgagcaaggtgtcaatcgccaaggcttcattggccctctccacctgcttgagtccatagaatgctcggtcaggttcgtgctgtaacattttgtagaagtcatccaaggcttttacttccccggcagctttcgtgtctgaaaggcggctcgctacagtaggatcacataggacctctttcagggagtacctgtgtccagaggaggcgtgtacctgaaggaatttggagccgttttccaggagcaccttgttt

SEQ ID NO: 9 - DNA, 598 bp, Rattus norvegicus
  misc_feature (1)..(598): n = a or c or g or t
aggaaaagcgactgctttaatgaattagacaaaatttcacatgaaatcagaatcctataatccttcccttctgatcactaaaaaatgcaagattcattcgttacaagccatgtgcgattcggacccctcgaaggcagtgcaggtctgcggtccagcctcaggtgctgcactatttcccattctcagcgctgaacattcgttctgtgagcatccgctccaactttatggcatcagcagcaaacttgcggatcccatcagagagcttctccacagccatttggtcctcattgtgcagccaacggaaggccttctcgtccagatgtatcttctccaagtcactggtctgggctgctttgacggaaagcgtgggtgccagcttgctgctgtccttgagcagctcccccagaagcttgggtgagatggtgaggaaatcacagcctgccagcgctttgatctcacccgtgttacggaaggaagcacccatgacaatggtcttgtagccaaactttttgtagtagttgtagatttttgtgacactcttcaccccaaggtcctcctgnggttcgtaggatttcttgtcgtgtttgcacatgcagtc

SEQ ID NO: 10 - DNA, 644 bp, Rattus norvegicus
caataaccaagatattggactttattaaaattgaagattatattagtcaacttacctgttgctttgacaaaataccggatacaaagaactgtaggaaagaatgatttgttctggctcccagtccattgtaccagtaggagcagctcataactgtaacagcaggaacatgagagttcgctcacatctctgtcttgggagatggtgtcaggagaagctcaaggtcatcctcagggatgcagtgaactcaaggctagcctggggtacatgagaccagcatccaatcccgaacggcatttttccttcttgccggatcatccttcccagaaccctggggagaaatgccaagactgtcctgttcacgtcatcttgttttgcctggattttgtgggtgaggagccttcagtcttcctcgagaacacataggtacaagacttgtatgaatcttcagtctttcctcaagtctggatgacagatcccttctattgctgctcatcgtcttcaatttcgtcatctgggtgagcaccactggggacgggcgtatcccacgcagccacccgggcacgcacttagccaactgagaagcccaccaaacgccagttccgggccactgttggctccgacgccgttgggggctgcgcccctcc

SEQ ID NO: 11 - DNA, 646 bp, Rattus norvegicus
cccaggaaatttacttaacaaagtcaccaaaatacagtaataccatagctgagggctctccatatacttaatctatgaggagaggctgactactatctcttttatctctttcaggagaaggaaggcaagcaagaaagggaaggtcagccaccatgactgaaatccaggcaatggctgaaagcctggaggtaagacaagtaacttaactgtgtcaaaaagtggggtcaaaggcgcagtagtgccactaccacgaaggctgatcctggagtgggtgctcgtgcccatcgggaactctggtttcttggtgggtgggtgttgaaggagtcctcttgttgactatgttaatgtgacagttaataggggtgacacacccacatggcaggcatcagcggcctgtgtgacatccacacacccacatcaaggtttctattaacttctggtccccaaactcctgctcttagcagtagatcagaagtggtacgcacgaatgcctggaaaattccactctatgtaacacctttggtttaaagacattttccagtgaataacagtgaaaagttgaattagtaactattggtgttaaacccgttaattctcaggatcaggcctatgggattccaccatgcaatgtattcgaacaaattct

SEQ ID NO: 12 - DNA, 513 bp, Rattus norvegicus
aaagccatacatggatggtgagagtaagcagctgtacagaggggacagcatcagtgtacatacattcatgtccagaacacttagcatacatcagggtttatacaaggtggcagaggctataggcacaatgatacaaaatataaagtatatttccatctataaatacacagccggggacttccctaggcaccaatcctggctccatcagtgcccttctctgccatctcacctccaacctcagatcttccgagtggccggaggctgtttgtacctgggctgttcctaaggggtcttgttaagggcatcactggccgccatgttctcctgtcacccctccccctctttcattcctgtctaagaatggacaacactctccctgttgatatagagattcaacaataaacaacaacatgacagatcattcacaaaagagcagtgggtaaaagtgctctcgtttaaaggaagtctttggcaagaatacagagttgcatacggagtgctctgcctcgtgcc

SEQ ID NO: 13 - DNA, 637 bp, Rattus norvegicus
  misc_feature (1)..(637): n = a or c or g or t
cataccagctcaattttaattttaaagtgaaaaatgtacaggtgggaaagttaagcaacgccctgcagattcataacaaggagctgacctagttgtcccactacaagctgacagctctccagcagtgattgatttgtcacagcacagaaatgccaccctggacttgtggtccgcttactaactggaggaagcagttttaagtcttaccacggcctgtgctcaaagtgagcactgcactttgagaaagttgtttgaccagtcagcaatgtctgctagctgacttacccgactggccatgagtctcatctgcacgttgactcgcctaggggagggtcctggtctgtgtcaaactctctggtaccataaaaaccaagtaacggtggatctgacaggttaccctgagagcttaagaagcagagtatttaacttcatttgtaganaagaagggagtagtacaggctataggctgaggtagccttcatttaaagtgcaatctacttgcgataaatatagtaactaggacccgttccaagcagctatcatagtcatgttgatgctagctaactagaacctggttggtcagttctcacacacatcacaagcagaagcccttgcagtaagctatcagtgagaagag

SEQ ID NO: 14 - DNA, 524 bp, Rattus norvegicus
  misc_feature (1)..(524): n = a or c or g or t
aatgttaccactccaactatttgccaacagtaacactggtatattttgtcaatgtacaatacagagagcacagcccctcatgactggtgccaggtcacatgcagcacagttcctcttccctgtcagacagtgtctttaactaaggacagacagtacgtggagcgtaagcaagggattcgggcactgtgaagcgggcagctcctcgccagctggccccagtcagatacactatggtggtcagttctttctgtgcagatgacaagggaaagatgaaccatgctgacagaggatggggcaggcgggtcgagccactgtgagtcagaaggctgacctccacgttgcaggatttgctctctgcanggatacagagtgctcagtttgcagatctgctggtacgtgacctcgatgatgacgacatgaatgggagggagatgggtgacccaagcaggccagcagagtgatgatgggccagagagggctcctgatctctcttgtggttgggcaggccccggtggctcatgagg

SEQ ID NO: 15 - DNA, 528 bp, Rattus norvegicus
  misc_feature (1)..(528): n = a or c or g or t
gaaaattccatacatggatataaggtgcttttatcaaaaccataatgcatgtccttctcattcatctcctagtcctacatatctatttccacctaaactcatgtgctttcttttacagctcactgaatcccttagcgctgcctatatgtagcgctaagtgcaggtgtacagcatgggtagcctctcagggaccacatatctgacgaaagctgactctcctcccagcagtcatcccaacagatctccaactagggatgggacttcctgatccctaccccacttatgctgagactttgactgagcttaatactcttcaatatttttctcctaaataagatttctaaacacagaactataaaattttgagcagaaaaaagtcttgtttttatgtacacaagcataatctgtgggtattgcagtcacagattaacaagagcataaaaacgagaggcagagcaangatctcttttcangaatgagaaaaaaacccacaaggctccagatctccananagtggtgtgcacaagg

SEQ ID NO: 16 - DNA, 597 bp, Rattus norvegicus
cagacactatgaattgctttaatggtggtatctgtacaagtgatgtcaggacacaggacagcaaatgcacagtggacatggctagcagacaagctgtgaatgaataaagagttcacactgctcccatgctgtagtgactaagacagctctaagccacctcctcctcagcctcctcctcaaactctccttcctcctcagctgtagcatcctggtactgctggtactcggacaccaggtcattcatgttgctctcaccctcagtgaactccatctcatccatgccctcgcccgtgtaccagtgttggaaggccttgcgtcgggacatggctgtgaactgctctgagatgcgtttgaaaagctccggaaaggccgtgctagttgccaatgaaggtgccgggcatttttaaggcaccgggtggaatgtcacagacagctgttttcacgttgttggggatcaactcgggcaagtaactgctgtccctgttttgggcatttaccatcggtgcggcaccgccttcaataacatgcggcccctgaaaaggtagccactgtcaagtaacgcccatggggggatgagaggagccatcaggtcctaac

SEQ ID NO: 17 - DNA, 591 bp, Rattus norvegicus
cacagtctgtgcagcttttatttcaacagggaagtaataagatctatatacagtctaaaaccactagaaaaggtgagtaaaaaggacccatggtccatctgggtccaaccaggggcggtggcacatgcctttactcccatcacttgggaggtggaggcaggcagatctgtgagtttgaggccagcctggttgacagtgagttccaggcaagccagagctacatactgagaccctgtctcaaaacaaaagtctatggagtgatatgaatggtggggccgggcaagcatcgtacctggcgtccagagcagggcctgggcatttctctggtacatgtaggagtgaggccttatgaaagaccccgcactgagcagaggcacagaggacactgcctacctgtttgagctgtctacctgtctccacaggacaggcggacattccaatgccatcatcgtaggtccagcctgacttacacacccagaagggatcaagcctggcctgcattctgtaaggatgttcagaacttcacggtgctattcagagcccccgagaatagccggtcgcgggagatcaccagtggagtgtaaatgtcct

SEQ ID NO: 18 - DNA, 520 bp, Rattus norvegicus
ttcaggcccaaacagttcatgagtgcagcatgcagcacccatggtccactgcaggccactccatcagtagcaagacccgaattatcagagaccggtgcctgtggcctgccacccagggtacactcaagacgccaagggtgtgggtttggctgagtatgaaaggtaccaggcagaggtcagcttggggctatgtgagctggccaacccaagggaagagggtaggtgaacagggtttccagtgtcccgtgtaccccacggcggccaagaggctaacatggggtctctggtgctgccaacaaggcctaccctagtgctaagcctgcggctgagtgagcaggttgtgtgttggggtcaggatgcccctcctaaggcgttactgctataagctactctgtcccagggcagtaaggaaccacaggggacattttccccacgaggttccaatgggtcaaatcactgaagccttcagcgcctatggctggcacaccaggggaacaagggcgtgggcgtgggtgtggag

SEQ ID NO: 19 - DNA, 589 bp, Rattus norvegicus
aatgatcaacttatgcattgtttatgggataccattataagaaaataaaacagtatagagttgtagaatcaataaatgatataattgatagaaaagtgaaataaacttggtatgtacaaggtatagacaagggttgaagaaaagaaatgagtatgcagatacccgtgctgtgattgaagtagctaaagaaagcagtattactggcaaatgctaacaaataactgtggggtgtgaattggtggcccccacacactcctgtgtttgaatgctcggctcacagggagtggcactgttaggaggtggcctccttggaggaagtgtgtcactgtgggggtgggctctggaggtctcctccttcgctcaggctcgaccacgtggggagagcttccttttggcttcctgtacaagacagtctctttctgactgcctttggatcaagatgtagaactctcagctcattctccagcaccattgataggaagcctggatgctgccatgtctgcccaccttgatgataatggacggaacctctgaaactggagcctgcgccaattaaatgtttttcatgttagagttgccttggatggta

SEQ ID NO: 20 - DNA, 671 bp, Rattus norvegicus
  misc_feature (1)..(671): n = a or c or g or t
acacctaatacatgaaaagaactctgaattgaaatccagccatctagaaataattctggtcataaaatgcacaattatcccatgtgtccaaagtctgctgagtttgctctgaagtttgtatttactccaatatctagaatgtctcaggaccacatgctgatactacacagaacagaagggagctgagcagaaccacacgtaaatgcaaacttaagaactttatggtattgctctggtgccttatgtcttaagcactgaccagagagttaagtgtgagctagaaaagttttcagagaaatgagctgcagaacttcctaccccacccctaggttattcagagcaaggagggctgatgtgggggatgagaacctacagactgaacatcctgctttcttcctacctcagtccgacgctggacatcctggagtgtaaggcactagaactggcctgagaagtgctccaagcttcagttcttggtgtgcaaaagaaattgtggcatagatcttttgaaacataataaaataactcccccctcctcttatattctgttattcacagacaaaaagacaaggaggtanatgtttgcaaagattaaaaaacaggtgaatcaaaatatgaagaaagtgtgtatacntattcagatatggagaaccacttagagggcaanagtc

SEQ ID NO: 21 - DNA, 631 bp, Rattus norvegicus
actagacacctttgataatgatagaatgagtatcttgtcttaaacattctcagcactatgcccttattacatatgacatctaaaaacaagatactcattctatcattatcaaaggtgtctagtaaaaaaggaaagattgacattgaagatgggactagaaacccctacttaggggccttcaaacggtttctcacacacatctgtgaggtaggttattatccacattttgtacaagagaaaactacacaaggttacataccttgtgctgccataatagcaaacagggaattagatccaattagatccggtccttagctttgcatttcttttctttataaactttaaaatataaagactgctagtaattgcattcattttaaaagcataagaaggcagccaaatagtttcccgggtggctttacaaagtgaaacaaatgaacagaaaatgcattcagtgaagacattccaatggtgacgctgtaaggtctggtcaagtggaaccaaaaggcagaagcaaaccacgtgaccgcctgtgggacaggtctcaggaaaacgggggagctgggggcagcagactttgaacacacgtttacggctactctgcaagtatttgagaatgcaccaggtactc

SEQ ID NO: 22 - DNA, 499 bp, Rattus norvegicus
ggtaacccaaccaattctttattgtaaagatgagtgctacaaaggaggcctagtgtgtagggagtggggggtcaccttctttcaagggactccacaaggtccactagagatgacatatagccaaggaataagcctgagccagggcagcagtggttctgaactctattggaagttggggttctgaatcaagcccactgacccaggtccatgaggaagtgttcaatgtcatcgtagagactattggtgctagacaagcacaggccaagactgctgctgtccagagaggacacaccctcacgctgcacgccttccagatgtgtcttgcacagccatggctccagcttcaccaggatcaggctcttctccttgggcctccctgctgacaagtcttgcccaaaacccaggtagatggtgtaatgtggtgatccttgtcgcctccgggcccggaactcctccagttctcggaagaaatgctgaagtcaaagatgggagtatggca

SEQ ID NO: 23 - DNA, 483 bp, Rattus norvegicus
acataagaaggaattccaaaggtatacccaaggggcattgatcataagctgaacacgcagagggccccaacgaatggcacagagtctgaacggattggcacgttcaacttccattcatgatggctgaatactccttctggtgctcaaccattctcagaaacacttgatatttcttgtcataatattttttatcagcacgctctgggaacacaaccttccccactttgctcattcttgccattgcctcctgcacagaagcaaagtcccctgaggcacaggcacccagaatagcagctcccacgaggacagactccacctcttgtgacagaaccacaggcatgccagtaatgtcagcatgcatttgcacaaaaaggggattcttgcttaggcctccacataagaagagggtactaagagaatgtcctgctgcttccatggtctcaatgatgaagcgagtcccgaaagcaatggcttgaatagtgg

SEQ ID NO: 24 - DNA, 558 bp, Rattus norvegicus
gctaaaaaatgcctttatttccagccagataaaattttttcaactgtatatatggttacacatgaaaaggtacacctctgtcgtcggccttgtttacaagacccagagcttcttattaatgtgagtatcaaacaaccttctttgtctctgaaacataactcaagtaggcggccgatggacctgccacacacgtgttcgaggatgggagtggcacggacttcttcgccaatgagtcgacgtgggatgaaggatgtggagattagattccaccggccagtcagcaggtggcatgcagcggaagcccgcctgctgaccgcactactgtggtggtggcccttctatgaacaggagacaaagaagacagacctatatgcaatgtggagaggcctttcgcagagtgcgaacaccattaggtggaccccagaacgagtaaaggcatcatgaaggtgactctaccgtgtacactactgaagagtatggcacctttttatttgacactcaataaatatctagttactggaaggaagagactcaagacacttgagctgttgtcaagac

SEQ ID NO: 25 - DNA, 556 bp, Rattus norvegicus
  misc_feature (1)..(556): n = a or c or g or t
aagatgcatttgacatgccaaccccattcacaaaaatacatggttccattgtgtagtaacagtcccactcgtgtgagggaaaacacacgcctctaatgcaaagctgctctcagggttacaagtaaaggagatgcctctgcagttagggaagcgactactgcaatcgtgaacgggaataactgtactccctgcataacgagagattattttggagacagttgataaaaaccatacaactttttagtgttaagtcaaagagtatcaaaatcanagcaaactacaggtaagactaacaaaactactaaggacatcacagagtgaaatggactagggcaggcaattatgatatgacacaggagataagaggaacattaaatgtcanagatctagggaagatccgggtactgattccacagcgctagtagtgatatgggttagatctagctccacagtgctagatcacctccatgggcatccgcaactcccttccaggtctttcacacttaatcagtgtcatcccgattcatacgcacatcgaagcgctctcagaatcatg

SEQ ID NO: 26 - DNA, 628 bp, Rattus norvegicus
  misc_feature (1)..(628): n = a or c or g or t
gactgcttatacatttattgagcacctgtcacacagcaggagcatctgtgggcatctgggatacagcagtgaatgaaaacagccatgctccattcagagatgctcccaaaagagacagtgtacaggaacgtggaacatttacatagtgttatcagtagtaggaaaagcccagggctgaggccgttaggagcaagaggcctgtgtggaaaggacagcatacagtgtgggattccagttcccctaagcttgccctatctgagggttcctggcagcaggcatgaaaggtgcctagcccaaccagaaaggccccttcccacctgctcttacccaccgtgtagtggtatgctcggattctccccagacttactgcagatcacagctacccaaagggaagcagtctacataagaggcacttctgtcaagtaatctaaaccctactctactagccaggcctagcccaacactggcatacatgccccctcttgttaatgctggggcaagtacgctgcctcaagctttgggactttggtgtgcannggaaagcacttgaagctacacggaggtggagccacaggggacatggtaatggcatgagggcagccctcgtgccgaatttctgggctcgagg

SEQ ID NO: 27 - DNA, 644 bp, Rattus norvegicus
  misc_feature (1)..(635): n = a or c or g or t
ccaacataaataagctctctttatttctggccctgattgtgtgccgccgtgtgaccagcttcagaccagccactgctctggcggcaggacgcacgacggccgctttgctctggtggccacagacaggccttcattcatacttgcagaaatccttcagtcctgtgggcaggcgcagcccatcaatggccagcctgtgtaccacactcctctggatcacaagacggcacagtgtctgcagagacggcaagccatactccagttggaccaggcgcacactcttggtggaggcaaacacatctaccacagcgtataggggctgagcagctggcagtccccgggcgctgggacccatgtcctccccgttgatgatgatgtgcatgtcagcggtcccatcctcagcggggcagaaaagaacacccaggcggctacggcgcgcaatgggacgcagcacgtttttgtcaaagacctgtctaanaggtgactataaagccctgggcgcttcggcccacagacggtccgggggaattccgaactgcgnatgcgcacatagggtccacaagtaggtttgggtaccgcggggaacgccgcctcgggctccgtttgcacctcccggggcaacggttttgggggccctgataacaaaa

SEQ ID NO: 28 - DNA, 740 bp, Rattus norvegicus
  misc_feature (1)..(740): n = a or c or g or t
acggctgacaagtttttattacacacttgtacactgggactgacagctgagatcacactgcaaaagtctgggggggggcacacacagccccctaacagcgatggggtacaacacttctcatcaactcatctacatatactaataaagtcacagtccatggcatgtcagcaaaaggggtgaggtaggtgtgagggtgcctggtcgatggccacagggtcaatgtccttcctggacccaggcttacatgggggaacaacacaggacagagttgccttgggagaagcttttgtcagtgacagaggctgaagcacacagccacaaagtcaaaagaagacaggagtccagagtaacaagttcaaggccaaccagaacatataatggtttgtctgagtcacagcaaacatggtctggctcctttccatagccagcgagcccttgtatatctgcagcctgattagtctgttactggaaacagagttagaccagctgcagctcccaagacgggcgtccccccaaaccaggagcaaaatcaagggaataattatgagactctttgctacttgtgactctctacaacactactgcgctctgttccagccactaaaccgatcccgagttcagagaacttgagggtgagtcctgnagaaatgcaggtanaagggttaacaaaggcaatgggcttcttaaaaacaggactanaactgggcctggtggcacaagcctataatcactgctactca

SEQ ID NO: 29 - DNA, 556 bp, Rattus norvegicus
ttttacaccactttattccaacctgagcacctcaatataaaactaaacactggtgagctgttctccttactaattttgagttactgtaaaatgtacacattctgctagcagatcaacacttaaatagattaaatcatctgacacatggtagatttcatataatgaaaatacctaaaataattagtgcaatatactgattaaaataaaattgacttcaaaaaacaaggcttcaagattactaataacattgtaatacttatgttacaaattgcaagtacggtgtttattatggttctagcatgtaagaacagcaaagccccttcctttcatagggggagaaagaaataattagctgttttagtaactgtacattttgtatgtttaggcaattcttaaatattacaggaaataataaacatatggagactacaatgcagtactctatttacagtacagctgaatatttaaaataatcaagtttgaatgtacataatggttagtgcactgactaatcatgtccaaagggaagcagagccccctccctgttctagcctcg

SEQ ID NO: 30 - DNA, 627 bp, Rattus norvegicus
cattcctaccctttattggactctaaaccgagctggctctgggcccttcacaacgtctcagacatcccccagaagggtttaggaagatgccatcattctgtgaagaaggcctagcacctaccccagacttagagcccccagtggactccctaagagcctttagggagctaaaggaaatgggtggcaggaaggcaaggggacaatattgaggaaatgcttcggtttcccagtgtctcctgagggtacactgagctctgaagaggactacttggagaaacagtcggagattcctaggctgagcagccctcatttagatggcaactttgaggagacgtttgatgtcaggctcgatgttgatggtctggaaggtgcggctgtagcgacggaaaggctcgccttctggccctatgaggaacttctcagagttccaggacacatctgagcggcgcaccggactccatatgatgagcttgggatcggtcatgagggagaatgggtcgtcataagggtacggcagcttgtctttcaggtacgcaaagacaggatgctgattctgcccattgacatcacacttttgggtaagactgaaggtgggctggaacccacccccagggcggacatacttga

SEQ ID NO: 31 - DNA, 506 bp, Rattus norvegicus
cacactcaagattttatttaaaaattccaaaaaaacccacaaaaatagacttgtacggtaacaatatattacttaatatattatagtatatacttaatacagtatcagttttaacattacaaaaagaaaaacggagtagacgacccaatatatataaatactataaaatcttattacaataaataaagtcgtcataaataaagggtccattggttggggcaggggcgtgggggaaaagggatttggcaatggctttggctatttgctttgggagggaaatttgagcaccaggattctcaggagaggctacaaccaccggacactgaacttcggggtctagtaaaaattaggatactattgtgggagccgggtcttcacagcacttaacattccaggagaccagagtttccgaggggctggtgcatacctgtaaccccagaacttggaaaaggctaaggcaggattatattgagttcaaagccagcctggggtaccctagtaatccc

SEQ ID NO: 32 - DNA, 641 bp, Rattus norvegicus
gataaaaggcaggtaggaatttaatgacgaatagcccatattggttgctgaacaccaggatgctgtccaaggaaccatccttaaataaaacaacctgaaaacagagttctcacacacacgagcacactcacggactctggaactcttgggatcattaaaccactactttaacgaacagatgtaaaatcacactaaaatgggaagtgggcacaaacttcaggaatagtgcagattgtctatgaacatcattttcttttataattttccatttacttttcacatatatgtacagtctctagactgtaaaagagaccgagtggctcaaaggacgaactacccacctccttctgtctcagaactaagtcatttaagctcataaacgtcttcaagtttcacttactaaagacagcaaatgaagccggcttttgaccaagttccccaggaaataaatagtacatagacctccaacccagcaacccgctggatcaaggaatctttaacctttcgagcatgaaccacagtcacaagcgtatcctgaaaaaacgctattcttctaagactgaagacagggaacggccacctgggcgatggaatttcatgtgatgcaggcacattccctgaagaggagaaacagagtcaca

SEQ ID NO: 33 - DNA, 597 bp, Rattus norvegicus
cacagttctaacagcgcctttactttttcccttctgtaaggcccagggagctctgtcaagaccaagtccttcactttccttcactcttccttcagccacttcaacagctggggtgcaaagtaggtgatgataatgtcagcaccggctctgcggaaggccgtcatggactccagtacagcagtcctgagatcaaaggccccagccttggctccgtgccacaacatggcaaactctccggacacctggtatactgcgagggggagctcggggtgcttgtccttcacctcctgcaccatatccaggtagggtaatcccggctttaccatgagtatgtcagctccctcttgaatgtcccgggccactgctcggagggccaggccacgggctccaggaggcagctgataacagcgtcggtctccgaaagctgggcttgactgagctgcatcccggaaaggaccatagaggcaggaggcaaatttggcactatagctcatcacagagaccctgttgccaagtccatgttttagcagggcagccttgatggcttcaactcgtccagccatcatgtctgatggagctacaacctgacaacctgcc

SEQ ID NO: 34 - DNA, 475 bp, Rattus norvegicus
agacaacagtatgtagtagttttgaatccactgagatgttgctttcaatttgaaatattgtgtatacatgtatataaaaaataatccaatgtatgactcatctgacagatgtttaagatcaataaagtttttgaacatgcatttaggaagagaggggagaagcccaccccgctaccctgttgttgctggcttatttctgcagtggtctcaatagtggtttttagagggaaccatgtgccttcagtcttcagagttacgataagataccataatcaagacgggaggggaaatggggaatgggcaggtattaatcttaaatacattttgcactctatctggtacaagataaaaacaggttaatggggataggtattaattaggaataaattgcagtcagatcaagacataattgccgaattgagtttttaatagactgcatatatagatgtttagccatactctagatcaactcttt

SEQ ID NO: 35 - DNA, 531 bp, Rattus norvegicus
gccataataacatttattaacttcctaagagcttgatcaaacaagccccatgggacatggggtagggtggctaaacagtgtggtcaggaaagtcaatgattagtcacaagggtcgccattaaagagaacatggtagccccgcgggctcgccctggatgagctggaacacattcttccctgacccctgaaaagacaggagtgcagatggagcagtaaactggagtgaactgctcagggccctgctgccacgtagctacatcttgcggacgcccccgtgtggtgatggcaggaagcactggctttgtcctggagatcttttcctttgaaaaagtcgcgaggagcccgctgtggtaattgggagagtgtgaccctgaggacagtttgaggacatggcatctccccaacagtaatagatcccacatctggacaggtgtcagtctgagattcaaagcaaggtggagagtcctccaaagtcacgagcagctttgcgaccccaggccgtgtcatctgacactgtatgtggtacataag

SEQ ID NO: 36 - DNA, 528 bp, Rattus norvegicus
acacaacaagaggttagcaactacacaggctgccactttaagtgaccagagccaaacaaaacacaattctttcacatggctttattacaattgcatgttagacacgacacacccacgttttgatgaaaacagtgttcctttggccgttgcacatgatcaatactgagcaatgtttgaacacagaccaacaatagcggtagaaaatttagggagaaaacagactgaattcactcataagtcttttgacctctaacatccctgggaacactatttttttgcattgctatgttaggcagtgtaaatgttagaaactatgctttaaatacgatggtaccttctcttatcttggcttcaattatgcaaagaaagtgtgcatgtttcttaccacgcctgctctgtatgctaaaattttgaataaaaaaaagccactgaatatagttttattgcatatattgcatggatagtgttcttatgccatttcatgatttggcaggatgattattacccatgagtctaacatgatgagag

SEQ ID NO: 37 - DNA, 310 bp, Rattus norvegicus
aagtaagattagaaacaacaagattttttttgaggctgatgagtgcaaagagaaacgctaaacatcagggggccggcaacagacaaaatggtgttgtagaggagacttaggtacaaaacggggtctggcatccagaggccctgtgggtttgggccatgttcactccctgaggccggcggggagggatgccccagcgggcagctgccctcgccctccggctaggcgggtaggcttcttgggggaggcggcctgcaagcaggtcctgcttttcaaggggagacaacgggggctccgtccactgagatcagga

SEQ ID NO: 38 - DNA, 436 bp, Rattus norvegicus
acagtcacggttggaccggcaggtgtagctgagattgcggcggatgctgcgcttgaagaaactcttgcagccctcgcaggtgaacacgccgtagtgcttgccgctggacttgtccccgcacaccacgcagtccacctgcagccccggacgctcctcgtcacccggctccgcgtcgctagtcgccccgggaggcgaggccgagtcgtcctcggtcgcgcgtgggtagctcccacctgccttgtccacgccgttcgtgtcgcctccggggccgccccagccaccggtcaccatggccatagccccggggacagcggggccggggcgccccgggacgagtccgtcccctctgggcacgcctggcgacccgaggggaacccggctatcccgggcgcatgcagcccgcgcgctcggggggctccggtcgcacccccccaaa

SEQ ID NO: 39 - DNA, 560 bp, Rattus norvegicus
cattgagaaagcatagctattgtgaaataataattcgccagaaattacatctaacatctagcgctgccaaatagtgtcactgtactattttatatcattcgaaatggaattcaattctgtaactaacaactgtcctactaggtgagagagaaagattatgtgagaaaatcagaataccatgtgatttgtagatttgggacgttcagaaacattgggaactaaatttagaatgggccaaagcctggaagatgggtctcacaccagaagacattccaggagctagccattttaggagatgtccctccaaagtgtcgcgatgatggccttgcacttgggaatcaggttctgctcacttggacatccctgcgtcatggactcttgctgcccccgttccatgtgctcgcaattccagctactggaagccaccaggaatgctttctaattatcatttgcaactagaactgtaatcagaaagaaaatttgtatttttgtataactcgattgtgtgccattttatataacaggtcctgttttacaaataaattttgttttactaactt

SEQ ID NO: 40 - DNA, 533 bp, Rattus norvegicus
ccgtctgtttgcgctctcgtgatgtccggccgtggcaagcaaggaggcaaggcccgcgccaaggccaagtcgcggtcgtcccgcgccgggctgcagttcccagtgggtcgcgtgcaccggctgctgcgcaagggcaactacgcggagcgcgtgggcgccggcgcgccggtatacatggcggcggtgctggagtacctgaccgccgagatcctggagctggcgggcaacgcggcccgcgacaacaagaagacccgcatcatcccgcgccacctgcagctggccatccgcaacgacgaagaactcaacaagctgctgggcaaagtgacgatcgcgcagggcggcgtcctgcccaacatccaggccgtgctgctgcccaagaagacggagagccaccataaggcgaagggcaagtgaggcggctgctggcaccggcccgcgtctctacgaacccttccccccccccagagaactctcaaaaaacggctcttttcagagccacccacagaatcagataaagagttgtgtcacggtaa

SEQ ID NO: 41 - DNA, 492 bp, Rattus norvegicus
aaacgatagtacaaaattgtatatataatatagatctatataggtatacatacagagatgctcatccacacacatatacacggaagcttgtgcatcagaatcaaactgtttatcctaaataaaaaagaaacttttgttttcctgaaagtttactatacataaggctgccggacaacttgaaaaccaaggcaacactgagaagaaccccggggcaccctcctctccatggccttggcagagcacacactgggccaggccagcgagcacagttgctactgtaacagttgacatagcgagacgccagaaactacgtgggaacagaggggtaacctagttagttctcagaaacaaatcacctcagaacaaagtatgtggttgggaaggaggagagaaaggaaaggtgagtcccacagattagagatgaccgactaattaggttccagtgcctggcaaaaccttccaaagacaagagccgtgggacagcagaaacag

SEQ ID NO: 42 - DNA, 285 bp, Rattus norvegicus
aaataaaaaatggcgtcttttattcatcaatccccattcacactgaaattcatgcatctttcttacattacttcgcaacatccttgctatcctttcccccctaagtcaacctgatgagttcatctttaagctcaagaagtttttctttttatttctgaaatgctacttacatgttgttgtctcaatatcaaggccaatctatgaatttattcttcctacgggtgaaatgggtgttaatacgggaacatgtgagcacctgttcaagatgacagcaaagttaggccc

SEQ ID NO: 43 - DNA, 519 bp, Rattus norvegicus
cagaaagttcatattcttccactctctgaagcaacagggatctgagcactaacaaaaagtggcaagcctggacccttcttgctatctggttccagagacaaaactattaagatgtgggacgtcagtactggcatgtgccttatgactctggtgggtcatgataattgggtacgtggagttctgttccattctggggggaagtttattttgagttgtgctgatgacaagaccctccgtgtatgggattacaagaacaagcgatgcatgaagaccctcaatgcgcatgaacactttgttacctccttggatttccataagacggcaccctatgtggttactggcagtgtagatcaaacagtaaaggtgtgggagtgccgttgattgagtcacatttggttcttcctcccttttttcctctggatgcactctgatgataccatggttaccccatttgagctctgtttaaataaatattgtcctttcatgtaaattattctggatgtagattgagcttattaa

SEQ ID NO: 44 - DNA, 454 bp, Rattus norvegicus
  misc_feature (1)..(454): n = a or c or g or t
tttttttttttttttttaacttctaatatgcttcctttattggctttccgaattataattgtgggggaaaaaaaatcccgcagagtcaagaaaagtagacactttctcttcctttcttgtccagggtaacagtggttaacagtgtaaatagataaaaatccaagttggttttttggagaacgttgtctgcagactgccaatcttgacgtttctagagccaaggactcagaattccttcttctagatgaccgtacccacgtggctctgcgcatccaagacaactcgtacttctttctgcgagtaaccactccgtggtcgtgggagagcggactgaaatccacttcccagcgctggaaagtcagtggcttcactttggataactccatctgaagccttcttggcatgtancgctctggggagcactgcggaggcgctgggttaggtgcggagcgtc

SEQ ID NO: 45 - DNA, 522 bp, Rattus norvegicus
ttttttttcttttttttgaaacacaaagtcccatttagtgtttttttctgatgcacaaaggagttcactcaatacattaacaataagcaaatcatacagatactgaggggaaggatgtccccttgactacatacacatatatgtatctattcttaagaacagcaatcaagaggttaacaataatggaaggaagaagtagacaggtaagtcactgccaaataacacaagttcataatgatcggttactcaagtaacctggcaaatgcctgctcagaatttacatttactttcctcattgactttcttgcctttgtgtttcagtgaatttggactaggtccaaaaactagaccttcaaaactccatctctcacattcagtgctgaagatgggcatgaaggtggagtatacttgagaacatgcatggtaacgaatgtcaaagagttttctcacagtgacctttcccctgtctgcttcttcccacacctttagaaatattttcatgcttcctctggagacattaga

SEQ ID NO: 46 - DNA, 584 bp, Rattus norvegicus
  misc_feature (1)..(584): n = a or c or g or t
ttttttttttttttgctaatgctctgaaaacactttattacacaaattacattcagattctgaaaaatagtgttctaacagtgtaaccatctaaaaataagacatcccggaaacacaccaactgaggagaaatttaaaaaaagaatttaaatagagactttttaaaatttctctcattgcaatataatgttagtgattttaaaaaaatagaaggagatttagcagcttttcgtcgtgtggcaggttggttctcttcactgccacaggctgagaatgctgaacaggaaaggcaccaaagaaagacactggcgatgggtgtggactgggagaatactgtgttcaagcagagaatagggctatttacatccaccaactaaaacgtctccaaatgtgaatgagctaaacttccctcgggggttggagcgctaccttggaagaggagggcggcttctctacgctaagttcatataaagacaatggcactggagtgaactggtggggaactcctcacctagaaaacagaagccaacggagccaaatgaagtaaataaggtgtgtacagtcncacactgacgagtacagtt

SEQ ID NO: 47 - DNA, 574 bp, Rattus norvegicus
tttttttttttttttttagtagaatctttttttattcagaaaaaaaaaaaaagaacaaaacaaaaaaaaagtaaaacaaaaatgaaacccaaaaacaattttttcccaaacacacacaggagggggtatgggtaaggggaggtatctgtccatccagccccagcccccagcccatgtggttttggcagcaataagggaaatggggtaatggcccaaaaaataatggtgtgtgtgtgtatggaaagaagggggtgcaaaagccaaagggagcggtgggggaagggacagatgaggtcagtactgggaacgccgcaggtgagaggccatttcataacatttcttgttgatcaaaccaccgtggacaccttctttgcccatcagcaggactagcgtcttggcagtcatggtgacagtgacattgaacgtgggggctcccccggtgctcttggtacgaagatccattgtaaattccccgtcttgcagcagtgagtcacggatcacagaacatttctggcccccaagtgtcagcccattcacgaaaaaacttgaccggtctttgcctaccaggacacca

SEQ ID NO: 48 - DNA, 404 bp, Rattus norvegicus
tttttttttttttttttcaggactgagtactttattgtatcttaaaaaaataaatacactctaactaatatctgtgagtatcttctgagtcagaatccggcaggactcagttgtctgacaaggtctgaggcttgagtgaagcaggctggccagctagtcaagaaggctgaggtcgatgtggaagtacacgtaggggaaatagtcctggttgctgagctgcaggccagggatctccacggatgcatccagtatgcttgctgcagcaacttcatccaggtgccggaagaccgaattgagcacctctctcaggcgtttggtggcagactttttatggggctgcaggagcacagcctggaagttcactggaagtccatacctgagcacagactccacaaacactctca

SEQ ID NO: 49 - DNA, 465 bp, Rattus norvegicus
tttttttttttttttctgaccagcatttttaatagacatctctaagccaggcaggggcagcctgatggtcccccagagtagagggcaatgcgctaggcacacctggctagctggggctggctacaggatggtgtacacaggagtatggcccccacggccaccctgggcacacaggggtacggggtgtccagctcaggggcaggtgacacagttcctgttggtgcaggggtcagggtggctcccactcttgctttgtttattcttgcggctccagccgaggatgggccagggtcgggtgtgtgcaggcgtcggagtctcaaaaccacattctctctggttccacagcagtgctggccgtcggggtcccgtgccacgtggttcggggccgggcagcaaggacacgacctgcaggctcacgccttcctcgcccatgctcctcagctgcgcctcgtgccgaattcttgg

SEQ ID NO: 50 - DNA, 321 bp, Rattus norvegicus
  misc_feature (1)..(321): n = a or c or g or t
cggacgcgacgccatctttatcctggatcttggacttcacgttctcgatggtgtcactgggctccacctccagggtgatggtcttgccggtcagggtcttcacgaagatctgcatgccgcccctcaggcggaggaccaggtgcagggttgactctttctggatgttgtagtcagagagggtgcggccatcttccagctgcttgccggcaaagatgagcctctgctggtcaggggggatgccctctttatcctggatcttggccttcacgttctcgatggtgtcactgggctccacctctanggtgatggtcttgccggtca

SEQ ID NO: 51 - DNA, 525 bp, Rattus norvegicus
ttttttttttttttttgattgtaaatttgttcagaattccttcaactttaattgtgggggtaaaatcaagcagccactgaggaaaaatagtccctggaagcagtcgaaacgtttgtgtagtggacacgatgagttatttattagcacaggttgtcacaagtcgccagctgttctcattcttccactgtctccttcttgccagtctcttgcccttcaaagagggggtacctggcctccacatcagcccaagtgatgttgccattggccagatcacggaccacactgggcagttcagagacctctgcccttatctgtctcatggagtctcggtccctcagagttgcagtgtggggggtcttgttcactgtatcaaagtcaatggtgatgccaaacgccacgccaatctcatcagttcttgcatatcgccttccaatagacccagaggaatcgtcaactttatgagacacgccatttcgagtcagagcttccgataattccttgacaaatggcataaactcttggttt

SEQ ID NO: 52 - DNA, 499 bp, Rattus norvegicus
tttttttttttttttttccagggctggaaggctctttaattgcaagtgtatggtaattacatccttggatgtggtccttgctctcatgggagggaggaggaagcagatggacaaggtgaagagagaatttacacggttccctttgaagcatctaacaaaggacacagtttttggcaacccatttcacagtttgtcacttacaagagagctctctgaaaggaaatacaaactcaaagaaagcacatgcatcacacaggaaaaactccccatccaagaacaaaacaaaacctagaaacaaacaacaaaaccccttgtttttattccttccgatttgcttctctggagaaatctcacttttacacaaataagtactggctggaaagctgggctccgatttgcccagcactgaatatttatttcagtgccttttagaaggctagcatttgtacagagtgttggtctctgctagttcagaaggttcttactaaaacagaacctt

SEQ ID NO: 53 - DNA, 365 bp, Rattus norvegicus
tttttttttttttccttagtatcaggagagctttgcattttttattacatttatttgtatgtggatacatgtgggtgtatgcatgccacatgtatgtagtggtcagggaacttgtggaaatagattctttcctcccactgcatgagtcttgggtttacactcaggtcattaggcttggcttcactgaattctgtccccaaattcaagtggcagaaacccagggctggaagcttcgtggtagagcactttcctgggatgtggaagatcatggagcccatgtccacaactacacacttcagtgatgagtacccaattagaggtttccaactttcctgacgctgcagctcctcattctgtggtgatct

SEQ ID NO: 54 - DNA, 529 bp, Rattus norvegicus
tttttttttttttttatgttttaaggtgtagttttatttacaaagtgagatgacacaggtacaaacagtatctgataactccatgttcgtgaaaagtatataaatatattacaggaaattatatatagtaaacattagaaacggatacagtaaacattgctagtttctcttctatgccaatattactgtcattaaaagcttaaatactggcttcaagtatccccctataaaataaatctactttattaaaatactggaaaaattctgctataaacaggatttggtacattaaaaatagactcagtgtgtctttgtaacaacatccactatgatcaaatgctgtctccagccctaagacctgctttgtccggtccatgataaaggagttttcataaccattggaggtcaaagcggctgtaaaaacacagcatcttgacgttcgcatctgacgggagcgcttgtccttcaagctcgagggactaaacatggcggtgcggcttggccttgctgctctcgtggagtggagagc

SEQ ID NO: 55 - DNA, 530 bp, Rattus norvegicus
tttttttttttttgattaaaaaaggactaaactttattgacaaacttgctgcagacattttgacataggttaagctacctatttaggcagacttacacatgtagcatttaatcttccaaaaacaaaatgggaggacggtacaaatccattaggactttaacttatgtacaaagtggactttgattctcttctcattcagctgcagtgtccctttttatgtcatgctagtgttgagacatacttaactaccgtggcaacagtgcgaaactgacaatggtcaacttaatgaacagcgtcagctttcggccccagtgtccaagtgagtttttcatggagtgcagaatctcagatggacaaaatactcttgacattttaaatactgaaaatttgattattagtactattattgaaaagactgtggctaaaaagaactgtcagactccatttaggcggccagcttccctccccagcaacctattcaaccccccccccactaagtatctctcaacactgtatgtctcctcgtgccg

SEQ ID NO: 56 - DNA, 461 bp, Rattus norvegicus
ttttttttttttttcttatacacatgcttttttattcatatagatttctgagacaatactgtaatcttgaaaggaggttcacactattacatcaacagtgaatttcagacagaggcaaactgagcaccataatttacaaatagaaagaccatgctggaggacaacagaagttcactaagggtgcacaatgtatccgagaagttcttaagcctcatcctcgccctcctcctcctcgaactcgccctgctcatcagccgtggcatcctggtactgctggtactcagacaccaggtcattcatgttgctctctgcctcggtgaactccatctcgtccatgccctcgcccgtgtaccagtgcaggaaagccttgcgcctgaacatggcagtgaactgctccgagatgcgcttgaacagctcctggatggcggtgctgttgccaatgaaggtggctgacatcttga

SEQ ID NO: 57 - DNA, 551 bp, Rattus norvegicus
tttttttttttttttttaaatgttactgtttttattctgtaacttatcatcattcagtggattttcaacaatatttcttttccttgttgttctttttaaagacgattttaagaccatgacattttaagatcatccgaaattaaagacacattgtaagccagctccttggtctcctggtccgtagcaaatagcaaactatcaaaaacaaatacagtttaaaaatgtttaaggtaacaattgttcccccaagcctcagaagttacatattataaatgtgtgtcacctggcagagagggagtgagaaaggagggattgggacatcatgcatgttaaatgttttaaggaagtgtgcatctactgggctggggagacggcttagtcagcacaagtaggtataagggcctgaatttggcacagtcaaaaacggttggttcgatggactgtggttataaccccagagctggctcactagctatcaagcctagtctaagctcctgcaagccccaggccagtcaaagatcctgtttcagtggaaagatggatgacgcctt

SEQ ID NO: 58 - DNA, 403 bp, Rattus norvegicus
tttttttttttttttttgagagtttaaacgtttatttaaacagaaacgccacaccacttcatcctcatcctttccagcatcaggctaacaagaagctggctcttgagccagtgttggcacagaggatagacgcaggctatactgtaactcaaagcagcactactggaaggcttcaatcacccagcactgcatggagggcgagcaggacaatttacgaagatttagctagagagaccatttgagacatttctgctgtcttcacttttactaaacccagtggatggttgtgacttttgaactggtttttgtttgcatagctgtttggtagggaaaaaatcttatggctgtcgtaggcacaattctggaaagtacaaattgtctctaaggcacagaacttagattc

SEQ ID NO: 59 - DNA, 596 bp, Rattus norvegicus
tttttttttttttttttgttgcctttattttatccctatttgaccatcaaatatgtttacagaagatggtttacaggtgcttgagcatcccactggattctctaccatttcaaggtgcaaaagaggcttacagtgtgtttcattaaacaaagcaaagctgcgacaaaacaggatcacatcaatagtagtatgcatcagaagagtgtagtaatccatcaaacacaattgggcatctgtgcctttcctcaaaaagaacaagagctctacactgaagaatatgtagtgcacaagaagcattgtttgtaggctgtgaaggaacataaactggcataatgtcacttattaattcaagtctcgatgacctatgacctctctgtgaatacaaaggggtccaatgtcttaggcacctgctcatgggactgtatgtttatttccagggtgcacagctccatacaaagacactaaagatgggtttggaacatggcagcatttacatatttgaaaaagttcaggcacattcggatacaaaagaaagggggggaaatgcaaatagaaatttctcttaagtctctgaaacacagtgcaaaattgagaca

SEQ ID NO: 60 - DNA, 544 bp, Rattus norvegicus
tttttttttttttttttgggttttacattcgaatacagaactttattaggaaaaattgtaggtgaagatacatcatttttcattgatatgacttcaaagtagaaatggcctctcaaataactgtcatatattaaaaacgagaataagaaagcacacactgcgtataggaagctgccttctcctggaccattttcacattatctgggagacagaactgaaacaaaatacagtattcaccacatgcaacactgaaaccatcgctgcgtagacactgcaagctctgcggaggaatgacttctgtgaggaagcccctggtgacgccgccgagataatcacccatgagaagataaacagaactcgatggagaggcctaaaggcctcatgccaagtcccacagaggaatgcagccttttgctctccaaaccctccctcaaagccgaccaagcaatgaatcagaggggtctgccacctcggctgcacttccttcccactgtccccgaatagcaagcagcacagtgtaaacacaaggtacaaatctgggttt

SEQ ID NO: 61 - DNA, 368 bp, Rattus norvegicus
tttttttttttttttttacaccgatggacgttccctttcctagctgacattgtaaaactccaggtagttgggagttaaacacaacccaccgtgggaaaagtaaacagactttcttaaattcgctggtaaaaaattctatcttgcccgaagaggtcgtgtctaagacagcaaatgagaccacccacccaccctttccgcggtagtccacgccaggcgatcagtctaggctgaccagtcccggggtctccagccacttcaatcaactctgatcgcagcaagatttgatttgttcagttctggatctcagccgaaggccggctcgcccacagcagcctgtgggggcgaggtgactcaagtcacttcccagt

SEQ ID NO: 62 - DNA, 582 bp, Rattus norvegicus
  misc_feature (1)..(582): n = a or c or g or t
tttttttttttttttttgaaatttgaagtctttattgaaccaattgcatgttaggttacaaagctatttcacttttccaaaatgctgtttctctttgtagaccaatctggccacaaaaggctacctggctaagtattagccagaaacttctaaatcccagtgtgatcttcttgtggcatttttccaacaaataatgcagaccaaatcacaagatggccacctcactggtcacatggtccttaggttaatgagcagaggctgacaggctgtctcctcactcttccaagaaccgcccccaagtgcacacaggccctgcttcgtctcctcatcggcccatcttctggtctccttcctcaccacaatcttcacctgaacagcagtcaaaaggcgcggtcggtaggccgcggaattatcactgcgcatgcgaccattagggtccgtgcttctactgccgaaatggagaatcccggttccttagcagcaggctccgtatcccgcggccactgaggaaccatccggggatgcagaccgagtacggtgggctggagaactgggagaatggggggcggngggcaagactgg

SEQ ID NO: 63 - DNA, 582 bp, Rattus norvegicus
  misc_feature (1)..(582): n = a or c or g or t
tttttttttttttttttgatgttttatatatattgtgtttaatctgataaagtatatgatccatgtataatgatgtatttaacatatctatgaagcacccaacagaggggcagctacttccttaagacattataaggagaattcacttgctgatcactgaaggaaaggcaatagacagaggggaataggcacagtagtcagaaaacatactctccctattgctagtaagggtagcagaagtttccaaattttgtactatggtttctaggaggagccatttggagcagatgataaaggaatgttacataaatcctagaaatatgaaggggctaaattacatgagtccagtaccgaagggtataggcctgcttcaaactcaggaacttaagggaagtctangagcaatctgacaaaaaggagttatggagatctgttggccattcacactgcttccccagagcacagacagcagctctcttttgcagctggctgccatttattctctcttttcaatcaccttcactctttgctcaacatccaattacatcccccggcccaaccgacatcatcttgtgtttgagt

SEQ ID NO: 64 - DNA, 188 bp, Rattus norvegicus
tttttttttttttttttagaacatcaggcatttttaatccatctttacaggttacctagaccacttttgagtaagacaactgtagacagttagtaactgccacgatttaggacgccagttggtggcacgtgtcaagttccacagagtcctgccttgccgggtgtctgaatgtacagctcggggtcact

SEQ ID NO: 65 - DNA, 281 bp, Rattus norvegicus
tttttttttttttttttagcattagcaatttgttttattttttccttttctgttgcataggaaatgcagtacttgcttccagtaattgtattgtgatgtgagaaggtggtagcactaacggttgaatacaagagttaaactaatccacaccagctcaaaaaccctgtggagacttagttgataagaatggacgcccacagtgattctcaaccaattacaagttttcacagaacacagtaaacgaaaagggtaactatgagagtcagtacaaatatgctaga

SEQ ID NO: 66 - DNA, 473 bp, Rattus norvegicus
  misc_feature (1)..(473): n = a or c or g or t
tttttttttttttttttgattgaatttcgtatattcagactttgaacacaggatgggatcacaggcctgccaccagcgagagcaagtggttcgaggagcacggataagtacagagatggaaacaggcggagccttctcaagaacctcaagcctaaactgctccggaatctaaaacctcttgtacagcgccatgacgccagccgtcaatcccacgcctgaactcttgggatggcttacaattggtattgcagacattgtcttcctgtggacagggtatatataaaacataaatggacttcatgtttagacttgcatcctctctcccgagatacctcattatgtgttcaccaatagtctaatgtcttataaaaaacagttctggtcncaaacatttgaagccatcatggtacttctaaaaatttcaagtgtctgaaggtcggaagccagatgcaaattccatgatccactttggt

SEQ ID NO: 67 - DNA, 561 bp, Rattus norvegicus
tttttttttttttttttgaatgtactcatgtcaaatagtgactgtttattgaaagaagcaatggagggctgaggttgctgccctcaggcctggatgtggctctttgcactgaaagctaggtagtagatcactatgccaattgctgcagccagcaccccgtggagacccaaggcccattccaggtaccccgatggtccacactgactgtgaacagtggtgggatgatggaaacgtcttcattatttctttgagccttccttaggaggctgtaggactcttcatcgaagaatctgacctcataggtgcctgcatgggcgctcttgtgctccaggctccaggacacctgatatcgacccacatcctggccgcgggttacaggaaattgttttccactaacgtcggcataaagagccatattctggaccctgtttttgcaggtcagtgagatctccacgatgaatacagtctctgtagaaatgacggcatctgaagttgtatagtaagaaggggtgatctggggttccaggcaggcctctgagcagcaagataggccggacagca

SEQ ID NO: 68 - DNA, 513 bp, Rattus norvegicus
tttttttttttttttttgctttctcctattttatttaggtctctctcttttttttttttcaaattccaaccagaagctaaatacaaatggaaaccagtaagcactagttttacttcaagagtaggatcattccgatttactccagtaaaagtatgcaacccttaagcaaagcttttcttcatttaaaagaaaaacaaaacaaagtaaaagctatacagtagtctttcctcatattcattgcacaaacgagttctgcttccagaactctccacactctgtaggtatttttacaatgtaagagccccacttttgttttctatcccaaacactcaacttctttaggatggtgtagaaaccaggatttctgcaaaattcactggattttttatttgtaattaaaatttctaacaccaaaaaacaaaacaaaaaccaaaaaagtcctctacttatgatggtttttgcagctatgactgttcctcggttttgtagctgcttcagccacaccagactcca

SEQ ID NO: 69 - DNA, 308 bp, Rattus norvegicus
tttttttttttttttttgaatgcataaattcctttattgaaaatattggagtagcactgcattacatgtagttggtatccataatgaagggccacacattcctgttcagacaatactgttttaaatagagaacacagcatctggaaatgctctcacgagtacagcatcacggactaaactaggtaagagtaatctacagggcaaaatgaccatcttgttcatcaacagcgtatggttacagacggtctaaacggtgaacaaaatcaccacgtgacattcctgggatctcgccaatcatcctcgtgccg

SEQ ID NO: 70 - DNA, 477 bp, Rattus norvegicus
tttttttttttttttttaacagtactgagtacttttattacacagactttaatagcttcagctggaaccagactaaacttagcacagtagattgctttcaattgtatattcttccttgttaacatattatggaacaaaaaccataattccatgcaccaatggtctttcctctaaaggtgccagagcctgagataagggttcgcctgaaggaaggagcatttagtcccacttggatgtttttctcctcatgtaccgatgcccttcactgtcaatggcttcatagaggtcctttttgttctcttgcgttgcatgcagataaccaatgtaagccacacagagtgaaagggctaccaatccaaaagccatcacaggtttgttaggtttaatgaagagctcaggattcacagctcgaaacaaggttgttgggtgcgtccctcggaggcctgggttttcaaagtttcctcgtgccgaattctt

SEQ ID NO: 71 - DNA, 145 bp, Rattus norvegicus
tttttttttttttttttctcttccttttcttcagcctgatcaacattgacttccttgtcacgttccttctccacacatagagtcatggggtagccaataaactgggaatgtttcttcacaatttcttttattctcggttcctcca

SEQ ID NO: 72 - DNA, 675 bp, Rattus norvegicus
  misc_feature (1)..(675): n = a or c or g or t
tgaaaaattcaaggcatatactggatctgttttcagaagagccgtttctcatacgaatggaggccgtgaacgccaccttccacctgagctgaggacgttctcttctcaaatttaagttcccccgagtacatcatggctctgacttgggttaagctcttggcaccaatgtcctgacaggaatgctggatgccagcaatcaaataagggacaaacttgtggatagaccctttgtcctgcactgcccctgaaactccttgggccactttgatcttgtcagcttcactgaaatatcggttctggctgctgaggtgtttgtccatggcatcaagagagcccataccacgatacttcttcagccggatcccatcggagaagaagtactcaccaggggcctcagtggtggcagccaagagggagcccatcatgactgtagaggccccaagagccaaagctttggcaatatgacccacattctggattcctccatcagcaataacagggacaccgaagcgacgggcatactcagagaccttgtatactgctgttgcttggggtcgcccacaggccaacacttcctgngtgatgcagatggaaccacttcccatgccgactcgcagagcgtccacacctgcgtcgatgaggttcttggcttgagcagcagtgactacattgcct

SEQ ID NO: 73 - DNA, 574 bp, Rattus norvegicus
  misc_feature (1)..(574): n = a or c or g or t
tctcgctgcccttggttattctaaggatgacattccttcactggtgaaaggaacactgccccaggaaagggtcacgaagcttgcgccgcgtgcccagtcagaggaagatttgtctgctttgttcgaagcatcaatgaaactgtactaattaacagattaatgaaaagaatcgccatcggcccttacaacggaagctatgagagcagaagttggtcagggctggcctttgccgtcttatctccacacttaattccactgttactggcttgaatgtgacgtgattttatccttcgggggattcctttgtgctcattatgtaagaccccaggagtcagtgtccctgcaccaaaccccatcaaatacagaaatatgcctctgtccagacactgcttgtctagaaattcaccctgaagaaatactagcattagtatgcaaaaaacatgacaagggtgtatctgacagtatgggtagcaaaaattaaaacaatctgaatcttccttcctaaatgaatcctaatatagtcagtaatagaatactgtggtgttgttaataaagatgaagccaaactcttgan

SEQ ID NO: 74 - DNA, 564 bp, Rattus norvegicus
caaacaatagacatttatttttcacttctcaggaggttgaaagcccaaactgctatcaggtttggtttcccagtgcctctccttggctggttggcagctgccttccggctgccatcctctctcggggtgtgaacaaaccctcggggcatcttccgtgtcctttaagtcagatagaagtatgagcctgccctaagaacctcattcgacctcaatcacacccttaaagtactatctccaaaaacacttacttagcatttggggcttccacacctgaactttagaatccagcccatagcaaggaccccacattgtctttctgccatccctctacttgctacgcaccatgattctcagacaggaatgctgtaaacccgatcccatagtttgtaaatatctgttaaatgactagatccatttaagtcgagctttgggcttcagagtagtaagagcctttggcctacacagaatgcaaagtctggaagagaaacaccattttccagctctgaggtctcccatcttctcattgatagttacttggatacggagaatctcccagagtctgag

SEQ ID NO: 75 - DNA, 501 bp, Rattus norvegicus
ggatagaggtttgatttgctcttgaatgttccagggtggagacaaggagaaagcacaggtgtggaggtctactcagtgcagtcgtctccctcatcctcatcctcaccgtccacagacagagcagcgtacttgcttgcagaactgaacttagaggctcggttctcctcagatttctttggctcaggtgcagatctggagtcttgatcttttttgccgtccttcctatccaactccttccagtggtctctgctccctccatccccaggaccacggctggagtgtccagtctggcctttggtggtgctcaccccatccactttagtttcatctttccttgatggtccttcctcagagggctgagctggagcaactttccctccaccacttgtaggggacggctgctctgtgtctgagctctgagatcgagcaggagggttagagcttcgcttcacccacgcattctcctttggtggaggggctggcattacctttagaggctgg

SEQ ID NO: 76 - DNA, 568 bp, Rattus norvegicus
acatataagtattattaaatgccgttttaaaatcatctagttgaaattttaagctaatatgcattaaaacaagatgctgcctaaatatgctgtcttagggggagacttcgctggcagtcggctcgggcttcacttgtatattgagcacatagtcatggcggaaggatgaacggacagtgcgattcatcagaggttgaagtgggcggaagttgtccaccattcttttctctttctctccctcagatgtgaaaagcagggtccgaaactgttcaagctgatcatggtcgacctcaactggctgcttcttaatgatccaggtaacagactctgagaggggaggcgtagtgagagatccagaataggtccagtaatctgggcaagtaggcatcagacaggaagggtcaaatgatccaaatttcaccagggtatccttgtgcttaattgatggcaaagtgtccaccaatttctgcagttctttatgatgtttacctagctttaaaaatacacctatcacagccaagccattttcttccagtgctgcatcctcaaaaacttcaaatttgactgc

SEQ ID NO: 77 - DNA, 340 bp, Rattus norvegicus
caggtgtgcaagctggtggtggggttttattaggggttgtggccagacagcaccaacattacatctggggacggccctagaccctcatcgtaggtaggtcagggaggaccaactgggttctggggtcacttagatgaggttgctttctttccgtgtcactgtgtgccctcctctgctttagtctcctcttcatttaaaagccatttagagctctgccagaagctgtttgcctggtgacaatctcaggccccgggagatgccttttgctttcccagtttctgagcttgggtggacggaagcctgatgggtatctgcgtccacctagagctgtaagccagag

SEQ ID NO: 78 - DNA, 486 bp, Rattus norvegicus
aaactgtcactttgcgggtagggaggctcggtgccgcctgggtcggagctctgtccccttggtggctgagctgaaaccaaacgcagacagccatactgggcggagcaggagcagggtggggcgcacgcgcagaaggccagggtggggggaggcaggggtgggttagaggtcactctcgccgtacagcgccgtggagaaggacatgtagtctagagcacccggcacggagtcagggcccgcgtaaggggccattctcgcgatgcagtactcggcttggtcaggtggcagctcgcggcgcagctcatccccggtgatgtaattcttatctccagccaggatcttgaaggaagcatgacctgatccgctgtatctgtgtcagccgtctctcgggacatgaagtcgatgaaggcctggaacgtcacttaccccaagcggtttgggtctacaatgctcatgatcgggcaaattctgcctctcactgggggt

SEQ ID NO: 79 - DNA, 582 bp, Rattus norvegicus
  misc_feature (1)..(582): n = a or c or g or t
caaacaaatactttttataagaaaaattccctttaaatatttatatacatgttaccacgtaatactgttaatcaaacccatggtttatttgtttaaataagattaaataaattgcctagatcttttaaatcaaaccttagtatggtataatggatatatgggttccttagacaacaataagaagcatgtgttcttgtctctagatcaaggagagctttatcaagtggtaagcgctgtgtgatggtgcagaagtctaagttttgaaaacaaactcattcagaagatctgctgctcaaatagtattttttcaaaaccaggtggaggagtatgataaaattcactgaactggcaatccaaaattgcactgtcgtcaacatacacgactggatacacggtccctcgtatacctgatgctggacaatgcatgtttttcccattcaaatatacatttaattctacatggtcatatgttatacccactacatctccctcctgaggaaggctgtttgctggcagcctgtttttctcttcgttgttgtggtacaaggctccatcatttctcatcnacaggctatgcatgtc

SEQ ID NO: 80 - DNA, 554 bp, Rattus norvegicus
aaaggaaaaaaataacagtcaaactttattccaaggtctgcaaacattcagactaatcaaagtggtactgtaatttcttataatacatcaataatacagtttttgaagtctagagaattaactaagccctaaaccacatgccatataattccaaagtaacaactgttaacaatgtgacattagccatgaacattacttaatgaggacataattaacaagctattcttacttaaggcttccttttagtatggaatttccaacatcaaaaattctattttgaaggctaaggaggttgctcagtcatagaacacattcacagggctgccccagcaaatctctcgccattcaacaactaattcaacgcactgatgagcccaaagcaattggtcgcccaatgtcaaccttctgccagcataggcaactcaagccaattcagtgagaaaccaggagatataaagatacgcggctaaaactttctccacttctgaagctgcaaaggctttagatgagtattaaattatatttaagtacttggtcatagagaactatttttc

SEQ ID NO: 81 - DNA, 629 bp, Rattus norvegicus
agctaaaatgacaaaataatagaaaagttataggaaccgtacatggagctccggtagtttgccttgaattagatacagttcctccatttgccccaggtgtgtacacaggtgacacaggtgagtgtgatcatacatcatatgcacatgagagatacatgtaattccttcatgctgcttgggtcagaacaggactgcctaaatgctaggcaggtgctttgtcattgagttctatcaccatccctaaaagacagtgggagaattaattctaattaatgtgcaagcttctgaatcagattattactaatgtagcaaccacctaactgcacagcttaagaggatgacatcctgttttacgctttctaattgtctgtgattcctactagttcccctgtattgaatattagttccagaaagagggggtatttacctctttaccttcttaataaatattcattgaattccacatcattgtgacatcctaaatacacctttgcaaggcccgtgacactatccaacatcagtgtgactgtttaatgagacaatatccgcctttaaagaaatccattgggtggtttagttgtcccccttggaaactagagctaggtaaaagatgtctgttgctctggatg

SEQ ID NO: 82 - DNA, 401 bp, Rattus norvegicus
gtgtgatctgcctggaggagctgcttcagggggacacgatagccaggctgccttgcctgtgcatctatcacaaaagcttcatagactcatggtttgaagtgaacagatcttgtccagaacaccctgctgattgacccttctgggcctgcttacggactcctctcaaagggacagccagcccctgttcctgggaggaggctcctcggacactggacagagctgagcttgggacaccagagagaacagggcacccttctgcactggcttccagaaaacggtcctccccgaggacacccagtggatgagagcgagtctgagagaagaatgaattgacctctatccttcccctcaccctcgacccaggagggaaagggcattttctttttcacctttgaaaggcg

SEQ ID NO: 83 - DNA, 535 bp, Rattus norvegicus
  misc_feature (1)..(535): n = a or c or g or t
gagttcataaactttattcctacaacagtgggtctttagcacaaaaagtacaagaaaagagagtttcgcctacaagtgcctctcatgggcagggttctgttcctggtgcagactaggaatgttaactcccttggttctaggaccagcatatcttaatctttcaacgaagcagatgatatggaagtcctctggagactgaagccacttgcctagtctcttgagcaaatgaacagacactgctatcatttgacaaggaattcagactcagaacagagacaacaaagtattttaaaaaataattattcatagacttgctaactgtcacttataaaggctagtgcaggcccanagtaagaactggtgctttctgagaaagctgaaaaaggattagaggtgccgcctgcttctaggtacgccctcacttacactctgcatagctaactctggttaaggacatggtgttcaagtctctgttctgggcttggagatctctgtagcctaagagagtatcagtgcatggttgacctgagccctg

SEQ ID NO: 84 - DNA, 550 bp, Rattus norvegicus
tggggtagacaccacctggttacgtcattctgccccccatccgactccacatgaggggcagatgaggttgaagagtgtaagtagtagtatatacatggcaggggttgaatcgataggtacaagttctgtcatatttacactatttcacatattcacaggtataaaggagccaggggctggagagggggcgagttctggctctgttctcttatataaaaaagcaccagtgtcctggactggacacccactgctacacagggagcagggggcccaaagcctgattgtcaccgactgatatcccgactggagtcccacaacttggtgttgggtggctcagtccgaaggcaggcgaagaaagggtgctgaagggcttcacctaaggtcagccgcttagcaggttcatactcaagcatgttttcaatcagatcgaagagctggtggtggtcctctgcctctgaggtcagataccgccgtagtggtttgcagttctcacggacgtagcgcccagctgaggtgttctcatcccaatccaggcgaccccgataaaaat

SEQ ID NO: 85 - DNA, 459 bp, Rattus norvegicus
acatcaatatcaacaacactactgatgaggactgaatgtataaggttggggctctcttgcaggaacctcagaattcaaaaagcagtttctaaggaagcaatgtggggaaaaatctacatctgaagtatttctgaaataaaaactgaaggccaagaaatcaaatttctggttgcgagatgacaaaacatctttctctttctgtttctctctctcaggatgcacaggtaggtatgcacaaacacacacacacacacacacacctatacacttcagaaaacaaggaaggtatcttaataaattatctggattcatatatgttattttagtctgtttcacttggaaaaacagaacaaaaacaaatgaatacaaaaccccaaaacacagaagctaccagttgagagtcacagactgatttccaactggcagtgtaatcttccaacaggaaaataacacctgtgt

SEQ ID NO: 86 - DNA, 590 bp, Rattus norvegicus
aaattcaattggctattagaactattaatgattctcaaatgttacatgccattgttgtagtttttaaccaaagcattaaagaagtgaaaataccagagaataagacttttcagactggattgactgggaaaggcttggataaaagttaaaataatcattgataatttcaaatcaagtggccctatggaatagtaattcttcatgatggagtccacaattggtcaatgaagaaagcttgttgcagatgattgagagcgatggagagatagaactgcgtcctaggaagggagtcctggacacctcacttctctggggacctgtcacctgcctccttccttcgaaggaggatgaatatggactccactgtaccatcaccgctctgctgtgaaaagcagaggaaggtggcccagaggaaaccacaaagtcccgtgtatgctgtcctccagttcacagggacaaggctgaagttggtcagcttatatgtattccagaatttctgcctcaggtccaaaaatatgtcatcctttccctggagaatgctcataccgacgtagaaggcaaagagggctactggccctccgacagtctga

SEQ ID NO: 87 - DNA, 419 bp, Rattus norvegicus
cccaacacaaacgggctttatttcaaccagacaagtgagttcttccattagcatcagcttcttcaaggctcaagggtatggaaaagaagggcggtgctccacaaggtagagaggcgaagactgaccaaggagtaactctattgcctttcaaaaagcccttggaagggtaccctcaatccaaaagaccattagctctcctgttacagtttgtgtacaacaccctcatttgaaagtgacgcgtctatcttaacgaaaacatcccagaatgtccatagatgtgagtgtatcataaattatatctacgttttagaaatggaataaagtaccaatctcagtttaaatactaaaatagaaataaaaaacaaaaaaacaggctttaacgttattacttgggatgtctcgttacacccttcctaggt

SEQ ID NO: 88 - DNA, 486 bp, Rattus norvegicus
aatgacagattttcctaaaagaaaccactataacatctttccaagtactccaagggaaaagaaaaagcacacaaagattagaagtctagtactttaacagcacgctgccaaacacagactaggataaatgccaggagatcttaaaaaaacaactctgagagatgcaatgttcaagtcaatcaaacatgtaggttccacgaacaacagaaacacaggtccacgagcagttcactcatgcacgattgtaactcactgtacttcatcaaagctcatcgaggcgcttaatcctaatgactgtctcaacagaggtgcttttctctttgcatggggatgttgtacacagacaagagaggggaaaaagtcttccagatgaatacataagtacaaccagcttcgttctcctttgataaagtactgaaggcagatttagtggactcaagcgttatcagtttccttaatgagcaatcttatgcatgctaaaaagag

SEQ ID NO: 89 - DNA, 428 bp, Rattus norvegicus
gccagtgctgtgcatgacagccgctgccactgcaggagagcgagtggaggatagctcagcctgtgcttccgagggtccccagcccaagctacatcttcaagagtctgctggctctttgtccattcatgttctctgtcgaagatggcttgtgggtgagctctggaggctaccagaagttgctttcctttgtaataaccgcttgccaaagctgctgggaactgtcaggggaagagaagggacatcaatgcaaggaaaaatgtagagatgagccaagagaaaaatgagcccaaggtactaagtctcagtgaggtggcgctggagacagagtctggaagggtggctgggatggatggtcctttccatctgtggctgggcagagccaggtttctctctcgtgattcgaggactctgaaacccctgtcctgaga

SEQ ID NO: 90 - DNA, 496 bp, Rattus norvegicus
caggatacaggcaagctgtcgtgggttttagagaagactatttaagtgagaaggtggtcgctatgacaactgcagaaacaactgtagtttctcaaagctgactcctgctggttctctgaggaaatgcaggtagaagctgatctgtgtatgccacagcattgactagatatctaatagggtctcttctcctggaggcatcgtagcctgggactccttagctacaagggacgctgccccaggtaggacctaagtactctctcatttcccagggcctggttaacccacgggcaatagggacctaccaagatcacttgtctattccaaccctgactttattccatcctgaccctagcttcccctagccttcctaaggggctctagatcaccctgatatgtgggtaaatctattaattatccccaaatcgcatcatcccttacctttaacaacatcctggtacttttttccccacctacatatatgcgtgcctcatcaaac

SEQ ID NO: 91 - DNA, 619 bp, Rattus norvegicus
ttttttttttttttttttttttttcactgcatctttgatttattcaaataggctgtatctttttgctctctggaatttaacaaattttaatagtttatgcagcagactttttttcttctgtggtaggtttcttctctgctggtttcttggtaaccacctttttccctgcaggcttcttcagcttcttggcatccacaggcttctttccttttttgcctactgcaggttttttgtctccagcccccttctctggaacaatcttctccgatttggctgccagtgcagcagctgcggcttccagctttttcactcgaagtttgtgattcctagcctggcggagaatggtgttcctacgcatagtctttgcgtaagggttcagcttcaacatgatcctcagattcttcagtggattcttcttcaagactctgcgctgaatcttcttgcgtggtgctcgaagggctctttggatctctgggcttttcaagattctgctaaggtctgtgttcatcatcttgtgcatggggaggttgtagttactcttgagggaagcagccttacgccaagtgccatacaactcatccaacttccggaaagcactttcagtccaaatgcagaaacg

SEQ ID NO: 92 - DNA, 423 bp, Rattus norvegicus
tttaggttcacttctaagttatgtaaaatatgtaatgtcacaactgagaatgactttctgattccgtcaattttttgtaacacatgccttatcacgatgcgtcaataccctgtgggacagtaggtcttcctgggacagctgatggtgaaaggaaggctgcagctcgttgtgagctggctacgactaggagttagtcacagaaggttcaagttaagccatgtcttcccagctttaggtcctacgcagctcctcactgagagcttcttggcagtgaactgtattatgtccttaggtttctccagcacatcatccacatctttccccgatggctcagacgcactatcctccactgattggtgggatgatggcaacttcgtctccaggctgaagcaggagttgttgatctccaagctcgacatactc

SEQ ID NO: 93 - DNA, 403 bp, Rattus norvegicus
gctcagtacatagatggcttttcttcaccctttgggttgacaattttctctaggttgctgctgatgatgtgatgaagctcagcatagaaggctctcaggtccagcaccatggccctaagcgccccataggctgcttcatctcgctcgtgcaccaaggcccggtaatccatctgggacggaggaggcaaatagtcagcaccggggaggtcagggctttgttttctcacacagaaaaagagataataaatacatgggtgtccttggaggccttggctacagcatccccacgctctgagaaatacttggagatggctgtctggaacgcttccactttggtcttgacagcattcactctctccagcaccttctcctgaattgccaccccacaatcaattccgtcctc

SEQ ID NO: 94 - DNA, 526 bp, Rattus norvegicus
  misc_feature (1)..(526): n = a or c or g or t
gttgaagtttttaaatgttatttatacctgttacattcactctcaccctcaatactgatgacagatgtcagaggcaaaacccagcacaaacatgaagaccacaacactgagcatccctgtgctttcagatacagtaagcattcagtgtacagtagtccttccttcacactttagtaagacgctgatgcagtgcagcagtctgcaaagcactttcacacagtccgtgcagaagacatctgattttttttaaagttctgtgatacaaatgattaaaataaatccaggatgaacaagtttcaaaacgcatagtgttctgtgcatgagtccattttctttaaactctgaaagaaaagtggtaagaaaacaagaaaagaaaatagctgctgcattctctggtcttctccattgctggtcaatgctcttatttactctggcatgtaaggacggatgtgatcctctatggtgccaactgcccagtgggtgagctgttcctgcggcaggtanaggcagatgctgcataacttga

SEQ ID NO: 95 - DNA, 541 bp, Rattus norvegicus
cgctggccatcaggtttattagaaaaaggttatcgtgtggttatttgtcctttgaacttctgggctcagcctttgctccaagctccctcccatggtggagccctggctctgcatattcacagacggggcagccatatcagactgcaaagccacacaacagagtctcaggcagttgggagagccaggcccactgcttctgtctagatggtttgcagagcagacactggggatgacactacagcctcctcagcagctagccagtctgctttgcctgcagggcttacgatgtcaccttttctttacaaacttctttctggaagcattgggatttaagcgtctcctcccaacacccaacatgctgtcccggacttgcaggatggctgagcggctggagatgtcattctctgcgaagggagaaaccccagctatgtactcgggggcaaacacgttggtcttctgcctggccttgtgggagagtcgcagctgagggaagcgctgatcctcggtcaggtgggggttgacggcatatttgccccctttt

SEQ ID NO: 96 - DNA, 534 bp, Rattus norvegicus
  misc_feature (1)..(534): n = a or c or g or t
ggagacaatgaaactttatttaaaaaccaaaccacttgngaaaatatattgcaggcttaacacagcaaacagacaaatgtatcactgtttcaagtaattaaattggtataaatacaatatagtactcatccaatagataaggtgccacattgggccagcaacactgcactgcaaaacccccagtaaaaatggcatttggtaagaaggtgtgtgcttctcctgctgtagtggccctagctttccttggcccaagttgcttacttttaggcctccttgtggctacaaggctctgtaaattcagagctgattaatactgggtttgcacttttattttgtgaacccaaggccaatacttctcaacagctcctgtttattctagcgactggcgtgtgagtgacaaccaaccccacttgcttttcgtgaggatgtgtcacttcggtgtacaagtcagtgaagaaagctgtttcccatgtacactgtgacactgtctggcttttctggggtttctagaataatagaatttgaagaaatgga

SEQ ID NO: 97 - DNA, 440 bp, Rattus norvegicus
  misc_feature (1)..(440): n = a or c or g or t
ctggtcagaaggcaagcccggcaggaggcggcttaacggtacttggaggtcagcacagtgctcacagaggcaaggaatttgtccagagaggcgtgcatggcgggtgtgaaatctccagggtggtggcaagccaaggtcaccagcaggcagtggctcaggaacttgaagttgacaggatccacacgcagtttgtgggcatgcaggtcgctcagagtggacagggcaccaggcaggtcttcgacgtggtctgcagctttggccaaggcatcagcaaccttcttgccgtgagccttgacctgnggaataattgcaatccccgatccccatcacgaatggggttcaacgggttacccgcgcctgccggcgtanggtangcacacgctgagccagtcagtgtagcgcgcgtgcaggcccggacatctaagggcatcacagacctg

SEQ ID NO: 98 - DNA, 347 bp, Rattus norvegicus
agggggacacagcgctcattctcgtttccgcaggtggatgtagatgatgccactgaccagggcgagtggaaaggccacccaggccagggcgaagcagtagccgaagctgcctccactcgggtgctttgccaggatctccttagcatggatggcatagatcagtgccccggagaacacagccgcactggtgcagagctggcagaggccggtggcgtagaagagccctcctctccgcatggtgtagagttggatcatgaagaggatgaaggacagacagcagaggatgagagacagcaccatgagcgcctgcactgccttcagccagccgttctcactgacgttactgc

SEQ ID NO: 99 - DNA, 405 bp, Rattus norvegicus
gccatctggtagcattttacacacaggcttcgatcttcagaataccctggattcagtagaaaaaccttttaaatgaagttttgtacaatagaaacttctcagcagtcaaaatttggactgtaaaaaaatacatgcaaaacatacttttctgaaaacacttaactttgaacaaagcaccgaactacacaaatgcagaatgaaaacagcatttcaactccaccaaaagtagtcatcataaaaggtgtaaaagtcacctaacttcactaggcactgttcactttttaaacaggagacaatagaaaatattgtccacaaacaacatcccagctctatggcaggtctcagaaagtcttcaacttcatgctttaatagcgacgaggtgagtaggatcttgatcgagaacga

SEQ ID NO: 100 - DNA, 454 bp, Rattus norvegicus
tttttttttttttttttacaggaaggggaagatctttattgcaaagtggagcttatcaaaggaaaaagacacaattctccatgtccttcatttcagcttctgcttctctttctttcatggaatctccaggatgtcactcaaagccagaattgactcttgctctgcgttggaggttcaggaaccttctatgggcaggaggatgtcccctcctcgtgatctctttgggttcatcataaagaaagccaagtagataatcatttcttcgtcggtgggatcttgccatgtccccaaaaatcatcacagagtagcccctttggaaggcgcaggtggagggatcaccagactctcttaggcatgtagtttcctgaacggtgaactctaagttcatgaccagtgtgtcttcatccaggacattaactctcttcagggagctccgcgtcgcccgaaacaggta

SEQ ID NO: 101 - DNA, 410 bp, Rattus norvegicus
tttttttttttttttttgcagatacaaagccgtatttatacatttatttatatgtctattcacttacgaagaggaccatttgggggacaggaagcaagtaggctgggtggcacctccctgccttcctcagagtcagagtgagtacatgataaataggagtcagagccatggagaaaagggagttaaccagaagggagacgctctatgaacacgcaggctgctaaggggtacagcatgggcagggatctgtgctgcgggccctatatacagcttaaagcgagggggagattagcccagtggctataggaacagcagaaggaagagaggaagggagtgccagctaggctgtcagcttccagcctgtggcccttacaccttcccctaagcccttctacatttggggcttaagg

SEQ ID NO: 102 - DNA, 549 bp, Rattus norvegicus
cggccgcttgctctgcccggcgccgaagaagttgttggtgtcctgcaggcggcacgagaagatctggcccacgtcgccgccgtcgccgtaggggctcagcttctcgtcgccgtagggcagcacctccgacatggtcgcgtccgggggctccgaggcggcacctcctccgcccgcgtccccgcccgcggaggacagggtcagcggcgctggggccggggatggccggccggggacggccctcggggctgccgcggtgctggggccggcgagtggccggggagagacaccgcttggggcaggagcgcgcagcccgcgcgagcgacccaacgagcgcccgcagctgagctgcgctgcgctcgggctccgcgcgcgagtggctgctgctccggcaggcgggcaggactcacatcctcggcgctctcgggcgcggggcgggggccgaaccgggcggggccgcgacgcgcggggaggagggtgtccctgcgagcccggagggcgcgggaccgatgtgggcgcaccccggggagcgcgcgggccggtcctgccgcg

SEQ ID NO: 103 - DNA, 522 bp, Rattus norvegicus
tttttttttttttttttggcagtcaaaacactttattggcagaataaaaaagtgcagcatgggaagtattgacctgccagacatttagctcctcatattcatccagagctgcctggaactgggctggtgtgaagccacgtgatatgcagcgctgttcagcctcagaaaagcggacactccgtccccctgataccaactcacggacggtagcaaatatcacatctgctggcctctgggtcctagccgtttgtcccttttcacccagaagggagtcctttgacatctccatcaaccttatggcttcattcacatcttccttctccacaatgtctaccatccgaaggcgagccagagcagtagaaagtcggagaatggccagcagggtccgggcagaagtgtaggtggcatccttactggcccgggcctctcgcctcatctccacatacgctgcagtgatgtagtcagccagagagtcaggcactgtgggctgcctctcgcggcacatggcaatgtaccgtctca

SEQ ID NO: 104 - DNA, 400 bp, Rattus norvegicus
tttttttttttttttatgttcagatgcatttattcagcaaaccttcttgctaaacattatggtagccctaaaagatttcgaaatcaggacattcagcaaagccctctcctctgaatgcggatagatgttccaaatttcctgttttcaaagcatagaatgcattcattggcgtaagtttttccgtcagtaccacacacaggatcataatccctggggcatccaacaagtgtattagggcaattagcctttttcccaatcaccttagctgtagtgttacctgctaaattgagcagggccaaagcactgagaagaaagataattgctaccttcatgggtgtagacctaggtccaaaactcagaagaactgtgcagggtgcttctcttcaacctcgtgccgaaa

SEQ ID NO: 105 - DNA, 275 bp, Rattus norvegicus
tttttttttttttttttcaaacaggaaattctttattgcaaagatacaaaagcagtcacggggacatgtacagcaataaattaggtgggggccatgaggcagggtgcaaacggggccaaaagtctgtgatcttgatcccttcccaataatttataacatgggggaaaaaaagcacaaaaaaaaaataaatattgaaatgaaattgccaagtggaaggcggctgaggatgccaggcctcggaatgatcggcatgtgtccctgaaaccctcgtgccg

SEQ ID NO: 106 - DNA, 515 bp, Rattus norvegicus
tttttttttttttttttggattgacagttgtttactgacagagaacagcaggctggagaggctccaagtgaagggggagacttttgggaagactggagtctgaagttggaggagtccacagttgcaagagtgtacggggtcagctctggtccatcttgccggggtgagtgggatcttcacccccttctggggtggcaggtggttcagccacctccagaatcagttccaaggcaccgtcaccgcacacccggcgtacctcctctcctctggctgctaggatctcttcaatgttcctcttccccttcaggtcagagaaccagcttaggttgtctgcgatgatgtggtggttctggcaaccagggcaagtcacgatgaccacaccctggtgataggccaactttgagatgtgcttggatgaccgagtcccacagaccttgcaggtgtagacgagctggtagtggtccgctttcacgcgccctaacgccgccgcatgctctgattccggcgcggagctc

SEQ ID NO: 107 - DNA, 515 bp, Rattus norvegicus
  misc_feature (1)..(515): n = a or c or g or t
tttttttttttttatttgtaattcaatacttttttttcctttaattcatactgaacttccatggctctagctactttacattaagatttggctggacagccttgtatgtgtctaggtactagcaataagtttttggaccttgcgcacagcgccaggcaaagtacagttatagatccaaatatagacggtcagacaacccaactgcaaccaaactgtgttctttcccactgtggcccagtgcaggtgttgggtgctgctccctctgcctcacccgactccaccccatgtcaggattatccagggggccactatggcctctgatccatccctccccacctcagaatgtaggttgagtggggtcgggggaagcaccatgggtttgggaaaatggtctggtccatgcagagagtggtctggccctagagtgcaaggtanggagatgtggggtgccacacattcttgttggcaaaagtgactgttttactgtgcagtctctgcacacaacacagaagccc

SEQ ID NO: 108 - DNA, 511 bp, Rattus norvegicus
tttttttttttttttttggtttttagcgactgttcgtttattggttagtgggagtacagcccatcggaacacacgacatgcatttgggggagagcaactgtgcactgcagccgctgtaaacctgctgagtgtgcgagcagcgcagacggcacccacggaaaaggcagggatgacttagctgtctacggtggctaagtgcaaagtctttgggaacagatttactttttgttactcaggaattacatcaaagaggaaagccctaactgccccccgttcttaaactaaaggctaagggggttggaatcatttgataacccaccatccaaatcacgttcattgcaaactgtaatccaattccccttcattaagttttccctgtcaacccatacccctcaggattatacacactgtatgagttcagaaaagattaatgtgaatgtaaggggtatgtattcgactccagcatctttgtcacatagccaatttcttttaaatgtctgctataacagat

SEQ ID NO: 109 - DNA, 353 bp, Rattus norvegicus
tttttttttttttttatcaaatactctttaattttattaactcttggaaaatattccaaggaaataattgaaaatacagaaatattttgttagtacaaagacattacctcaactgtcctcttagtgaaaactgaatatggtctgcgtgatctattagggcaatagtaaaaataaatgtctgtgttacataagagctttgcataaaaatccctgtattgtgtgtaatgtatgatatcgtgtacgcgatgtgtgatataaaagttagcaaaatgaaaaataaaacagcctttgtggattaggcagaaaaatatcaaacccgatgccttttccttatttcagtgacacgtgggaag

SEQ ID NO: 110 - DNA, 147 bp, Rattus norvegicus
tttttttttttttttttgggttttaatttaattttatttttgtcacatgggcagtataggatggtgttagcccatccttactccgcttgcattgactgtgcctcgggtcttaagacgctaaagtgtcatttagaactcactcccaga

SEQ ID NO: 111 - DNA, 550 bp, Rattus norvegicus
cggcagcaaaggttttttggccttttttttcaagttcaacaggtctttattgaatgtcatagttcaagaggcaaatctggacacactggtatcagtgagcttgaaacaggatcactgatgcattggtgatgataattcctagcaaatgtgattgatttttacttgatttccaagtagctctcaggcatctaacctgtgaaacagtgactgtttacatacagggatgcaaggggacataagaatcagagcagaaaggaaacaacataaggtacttcacgaaaataatgttccaagaactgaaaagcctcgaaggtgtacaagaatccagtaataacaaactcatgttcaagcaggattagaaacacagcgttaaaactggactcagtgccgtgtcttcacgtgcaaacctgccaacactgaagaggatcatcccattttcctgtgactagtcaatacattacgaagttcttttgcaaatcactctgctgacaagtaacaaaactgcactgaaagcctttactagtcctcttcccctccctttctcccgtgt

SEQ ID NO: 112 - DNA, 554 bp, Rattus norvegicus
cggccgcagggcagggcagggatggggaaggtctacatctcgttcaggtccagcagggtctggtccagcatcctttgtgtacagagatgctcctctttggtgcacttcagcttatcttccaagtcatcaatggtcttttccagtttggctaccgatctttcagcaaactcagcccgggtctccgcctccttgagtttatcagtaagaatctttatttcttcttcatacttgtcttctttttgagagtacttttcttcagcagcactcagacacttcaggttctggtccatcagtctgatctgctcatccatctctcggcaacgggactctgccagctcggcgcgttcctccgtgcgttccaagtctccttcaataatcaccaacttacgagccacctcttcatacttcctgtctgcctcttctgcaatgtgctttgcttccttcagctggatttcctggagctccatcttttcttcatcttttagagcccggttttcaatcaccttcatacctctctcactctcatcagcagccttctccgcttcctccagctt

SEQ ID NO: 113 - DNA, 558 bp, Rattus norvegicus
tttttttttttttttttaaggatcatcctactgctaagtcagtgtctcctcttgattctagtgttttggccacgcctcaccaaatgtctgcaatgatccagtactcacaacatgttcaggaggagctgggtcagattttgacagagggtatgggaagggaaaggggagaagaaatcgacatttattttattatttattttaaatgtttacatttctttgtgttgttccaagcctgaatagaaacagatagcattaaaggactctgttcccaccccttctctgtctctctctcccccacttgtgctaacttaggataacactctctatttcgttttgtttctaaagtgatttgtggacttgtgccgtgtgaactgcattaaaaaggttctgttttcaaagatcgattgtcgttcctgtggggacagtggctcctaagaaatctgcattgtaggagaagacaatgaaagaccctggccctgtctctcaaaacttaactctctgtatgatttaaaaaaaaattccatttactttactttgtggttacttgattttgaggaa

SEQ ID NO: 114 - DNA, 548 bp, Rattus norvegicus
tttttttttttttttttactttttaattgtttaactttattactgtcgcaccatttatacaattacatataatttcaatgcatccattgtacattttttttattttttgttttttttttttattttccattttccaatgggtggtgtgttggtgtctgagacacaggtggaagaaactggagctgcaatgaaggcagacttttttatttttcatttccactgaccaataaacagaactacaggtgcacccaaccacggacatgcattaactcgtcatgagaaatctaggtaggctaagtatgatgagagaatgtttgtcactcccaaaaatatctggagaggaagaatgtagggttggcattgagatacaatgtggacaagctaagtgggctccgtctgaaagttggcattcatccacaaacgttaaaaaaataccaaaataagaaaaggctgtaaattaataaggaaacacagaaaatactgctttcataaagatctgattgccttggcactggccctgtgggcagaatcaaacgcctccctcccca

SEQ ID NO: 115 - DNA, 139 bp, Rattus norvegicus
  misc_feature (1)..(139): n = a or c or g or t
tttttttttttttttttgagataggaaaataaggagtttaataattggagggggcagcacacacactgcagcagtcacaccggtgcggtctgccagcaccggctcctgcagtgtcgcagggaangangggttggcatga

SEQ ID NO: 116 - DNA, 533 bp, Rattus norvegicus
  misc_feature (1)..(533): n = a or c or g or t
tttttttttttttttttggtggtttggaattcttttctcttttgttaaaagaggggtaggaaatggggaccaggtacccctgggctctgggaaacaggcatgcagggaacccttgcaggcaggggctgggtagaagagtcctggagtttcccataatccttcgcaggaaacagcaatgctggcagataaggaggtggagtgaggcagggcccttcaaacaacagggtggcgggccaaggggcttggggctcactctaacatgcaaagtccagctgccccataaactaggttgcttttgaagagcgacatacgtataaatacataagacacagctacacgcacacatgcggagaaggctctgcattcccaagggtanggatctaggcctactggccccaagacaggagtcatcatgtgtctgccaccaagtgattctctgaaacactccaggtggtggggccaggcaggtaagtcttcgttgggatggctgcttggtctccaaggtgctgcccactaggcacccaagccacttt

SEQ ID NO: 117 - DNA, 423 bp, Rattus norvegicus
tttttttttttttttatgatttgaactttattcaaaagaacgattatcagaagcagtcaaacaaagacacatacagggcagggtccagcagggtctcgagcacagaggctccctgtcctgccatcacgggacaagaatgcatcagtctgaagcagagctgtgtgttcatctgcagggaagctgctctaggtctcaactggagatagaattgaaccatcgtttgtaggtagacaggattcacagagatgttgaactgaagtcaaccccctcttcttccctttagaggtccttctagctcaaggcctcaaccctgtaatcgatgacaagctggtagtggctagctaccatcctaggtcatctctcgacataaattctgctgtgacacacaaggcagacaagtaacaacgacactccatactctca

SEQ ID NO: 118 - DNA, 530 bp, Rattus norvegicus
tttttttttttttttttgtggtaaatagtaggtatttatttgaaatgaaaaaaatacttaagtacctggactattgcatttagcacgggctgcgactgcctacctttatgcatcagacagagatacagtgaacacccagaccacagactgcacatggtaggaattcctcagcctttacacaaccaccagagaaacagagatcggattttgcaatacagtacaaaagtccacaatcaatccagtcttagccagtatcttcggtttacttctgttgctgtacaaacgattagccgttactagggcttacaagttaatgacaggacagaaatatacatggcactgacacaaaaagtcagttgtgttaatggtcatgcaacaagtaagcaaacttgctgaaattaaaaatactttctaaaaacagctttaacagcgtaaatattttatacacagttgtttaccaagaacaaaatgtatttaaatgatacaaagcaaaaataagtttctaccacctttatacataagaaagtgca

SEQ ID NO: 119 - DNA, 371 bp, Rattus norvegicus
tttttttttttttttttaagagcttagaaaatttatttttttcttgaaatgacacacatgggcagggaggtaggacttggtgtaggttggtggaaaccgtgtcccccagcatcccagttttcctctcagttctttgatgagaggtctcctaaagactgggaggcggagcggagagctcccagttctaagcttggaatctaacttgaagtgcggagggtatggggatgtggtgggagccatgggactttgttctctggtaaaaccaaaaaatcaaaacaacaaaactccgagtcagctcggggatacttaatttgcatattggatgctgggtttcaggaaggatgttgtgtgttggtccttgcctcgtgccg

SEQ ID NO: 120 - DNA, 455 bp, Rattus norvegicus
  misc_feature (1)..(455): n = a or c or g or t
tttttttttttttttttgggatacagaaatagttttattttcttaatgcagcacagtagacatacaatcgattattccctagagtgtgcaatataaattattcacattaaaaaattaacgacaaagcctgatatgcgggaaatattaaaaacatacacctaatttttatgtgttctgactgcggacatggctagctttataaatctgaataaataggacatggcgcacagtggcttgagtatagacgggcctgctccaggtgtagtgagaacccactctccactttggtcatcgagattccccgtggcagcgtggggcggctctgaaacacttctggcactccagggagggcgtctcgggcgctccccctactctcccttgtancgagggggtcttttctccttgaaagcaagaagaccttccagtctgtccttcgttgagatggtctgagcata

SEQ ID NO: 121 - DNA, 483 bp, Rattus norvegicus
  misc_feature (1)..(483): n = a or c or g or t
tttttttttttttttttcaagctccatcaacttttactttcatgagtaggagagtgggggtcagctgttcgattctgtgcccaggacagcaattgctgcctggcgcccactctctatacagtcattgacagctaccccctcataggaggccccagccaaagtcaggggcaacctctgggccgtcaggaattgcagagctgagtctagtttttgccagtggcctagtgtatactgagggatacagtttttgtgtagatggaccaagcaatggcttggttgctctttcagtcctaactgtgtggcagccgcttcctgtgctgctcgttggaatagctctggagacaattcatggccattggctttcagcttctgtaaccagtaacctcccaacatcacagtcagtctgaggcctgnggggttcccatcctgctcaggaaaagcaaccgagtcatacacgattcccaggacggtcgggtcttctga

SEQ ID NO: 122 - DNA, 472 bp, Rattus norvegicus
  misc_feature (1)..(472): n = a or c or g or t
tttttttttttttttttggtttagcaccatttatttgtgatctcagctgttgtagtagttgctgctgtcagcctgttctcaaaggtaacatgctcttccgttcctcttgtccaggacagaagggtcttccaggtggcacgccaacagaacaagagactccgatgacgccagcttcaatgatggtgccatccagagagggagagtgtcatggcacattcaatcgcggcttccagaggttttgaaaaaggagcctttgggggcccagcctgcctggcattttgatgctgtcggtgtgagttttgtattccataatggtgttgggaggtangttaagcacgcgccgaagagtgtcccggattcgggctgtggttgcttggtcgctggcagtcttattccatatagaaataatgtcctcctggaagcggacagagaccacagccccgcagatttcctccccaaccatgaactgttc

SEQ ID NO: 123 - DNA, 504 bp, Rattus norvegicus
tttttttttttttttttgagaaatagaaagctattttattaacacgctttacatttacagttcattagctaatcaacatcaacatgcaaaaataagcgctagatacaaacctctacaatatggttttgtgtgaattacaatggttcatgtctggaaaacccgtcagtacttactttagctgaactatcagtttccgtaatgaaaagcatgtacactctaggactacggaaccacctggcaaggcctctgcagaaactcagtccagtggctttcccgtgaatacattctcaaagcaggagataaggcggtgctggaaggtgagacgctgaacctgtgcacagacacagccccagacaccctggccacaagggcagctcggaagcgtttattcagtgtctcatagggcaccttgagggtcgggtactcctgcaccttcagggtcatggacagctgggccgccgactcctgcaccgccatcttgggccggccctcgtgccgaattct

SEQ ID NO: 124 - DNA, 575 bp, Rattus norvegicus
tttttttttttttttttactggccacttccaagaatgctttacaggttgtgcaaaaacatttacaggctccatgtggtatttgtttgtttgtttttttaaacaagtttttccaactacaactacaacagacatctgataaaacactaaacaactcttctaaggaaaacaaaaccagggattcctcttaataccataatctacaacccatacctgccccaataacatttcttttcataataaaaacacaagacagaaacaaaatgcagacatccactttgatacaggagacctcctgaacaaacccaacaaggatgtggcagtttcattctccattcaactagaaaaacagctttttaaaaagaggactttgacttttctggtgttgtaaaccaacagcgagtatactctctaacccctgttgccccaaacttcagtgttaagtttttgcccttcttatggctccatcacctagaatccaggtcacagacactgtaagtgttacttgttggaggactaacatctgaagggacagcttctgcctcaggaaattaagtttcctattaaaacataattt

SEQ ID NO: 125 - DNA, 435 bp, Rattus norvegicus
tttttttttttttttttctttaaaaaatatcttgtttatttatttttaaactcagggtgaaatacaaaagtcagagtatggtaccgagtttaaatcacagacacaggaagaataaaatccttgctttatctttatgaataccagaaatgtcttttgtttcactatatcacaaatatacagttgtcttcatttactgttgcaggaagatttccttagaatatctgacagcttcatacaacccccacttccaccctgaaacaaacacactgaagatcttgtggcaaaaacaaaacaaaaaatatcccacaaacccccagatacaaagacagaaacactccgagcacagtgattgtctttaccttaagaactagatgcagtaacacaaacaagccctttactgcagggaagagctctccccgccacagcaatgactca

SEQ ID NO: 126 - DNA, 503 bp, Rattus norvegicus
tttttttttttttttttgaatatactttctgatcggtccctgggtacaaggaagatagcagactcatgtcctcccaggagagcgtcatggatgtccaagggccttacacggagctggagaatggaacgacctgctttccacccacataaacctcctcaatgtttcggtcatctcctagatagaggaacttctggataacagcctcagaaatatcaccaacgaaatccccacaaaacagatcaatgggagagtccgatgctctggggttgatcaagagggcatcaaaatccttgccgacctcaaagtttccaatttcacgatcaagccccagggcttggcttcctccaagagtggctagtctgaagacttctttgagggtgaggcttttctcattcaccttattaattaagaggacgttggaaaccatcactgctcttcggatggcgtcaagcatggaataggagtaaccaccagccacatctgtcccaagccctatcttcact

SEQ ID NO: 127 - DNA, 568 bp, Rattus norvegicus
tttttttttttttttttattttataaaattagatccaattttattaaggatttcagattacatatttcagacttctagaggagaatagaaccacttggggactgacagatgtcacaagaaagactgacccctgaagctccacacagcattttcccattagacaagagccagctacctctgcactttggcaacagctacctcctacagaaggaagggaagactgcgctagtctgtaaggttactgaagaggagatctgtaagttataaactttaatgttcaagaaaataggctgtgtttagatgaactatgattacagaaaatagcacaaaccatctaagaaaaagcaaccaaatctttttcaaaatgaagaaaatatagttggttaaggatttccagtagttaaaaatttcaggaagattggctatagaatgtattcacattctaagagcttaatattaaaatctcacaaaaagaactatcacctccaaaaaaagtttcttcaatgtaaattttattaacagcaggaacttcctccaagtccaattcaattaaaccctgtcagagtgc

SEQ ID NO: 128 - DNA, 534 bp, Rattus norvegicus
tttttttttttttttttgcaccaattcaagtttggttttattagaaatcccaccataatcagatttttaaagactggatggttgccttgtaacttttccattcccatttagaaagataactagaagcaatgacaaaaataaccacttaaaataggggattcttcccccgagtttcttgtaagcgtaagtccaggcattccactcttccactcagaaaagaaaaataaaaggctttggagcacaccaacctttactcagatggacaaaacatctgcctccagttctcacgttagaccaggacgcatatccagagtggctggtctccatccagcccatgcttgctaaagcagccgagtaaatcccaaggtcagtcccaaccccaaccttcaacagtatgaactgcttacacctcttatgacacaagccatgcttcggcggaagggtcgggtcagacacccctcatctcccgtgggtgaatcacaacagcagtcatgtttgtgttctcttccctacagttcagtgtgcaaagccatt

SEQ ID NO: 129 - DNA, 536 bp, Rattus norvegicus
tttttttttttttttttggaatgatcaaagatgtctttataaagtttttcacgacttcattctaaatatacagaataaaaaatggcgtactcatttgtgagacaccaaccagattttccttatactgtctcaaaatttaaagatcaatttccccagagggtgtgcaatgcatcataaaatggcctttttgagggtgggaaaggaaggcatattacattgttccatgataggcatgcaagactgctatccaacatatataacttatatacatttggtgacttagaaaaaccaatcatttgtgacaagcctgaaaagcctggcatatttaacatacgtcagaaggttctgtgtggccgaggttctccagttggaccatgtggccctgtgaaagtgtcagaaggccaattttgttaagtttgcagcagaacatcatatccaccctaaagaatacaatgtggattgaatcgaaggtggagaccttaccttaacaaagaaagcaaaagtatgtcagtgtaaaatgtggactaaactgcttt

SEQ ID NO: 130 - DNA, 409 bp, Rattus norvegicus
tttttttttttttttttcaactttattccagtaatttaagagaagattaaaataatagataatatgaaacagatgaagataaccgagctggtacaggtccaggccagcctagtataaagttaaggaggcatggagaatggtgaggcaggggagtggagatctctgttgcaatggcggaaagcagcttggagtatggttgatggtactgtctccttctacacgtgtgttcaatgtgttaacaaatgggaaacggaatcctgcctcattctaaaccagatggtaagagaaatatggcagaacgaggttgtggtatccaggcggctcgggcctgctttgaacactctaattttttcaaagtaaacgcttcgggccccgcgggacactcagctaagagcatcgagggggcgcc

SEQ ID NO: 131 - DNA, 425 bp, Rattus norvegicus
tttttttttttttttttacaaggaagcaactttattactcgttcttattactcattcccagtcagtttctcttcttgctcttgccagtgactttggacggcgtgagggctggagctgtagcctggtacagagtggaggatatcttgttgatgttatacagaccaaccatggagaagatgaatcaagtggtgacacagactctgtggatgaggccatatgcgaagagtgccaattcttatggaaacgccttttacagtcatcgctgatgtgctcagcagatacagtcttgaaggtccggaggcctcttggggtttctacatatcccacaatagccacaaccaccatgggtggggtttccacaatggtcacaggctcgacaacttcggtcttattcaccttagatcctggccggtcaacttcccgga

SEQ ID NO: 132 - DNA, 550 bp, Rattus norvegicus
tttttttttttttttttcaatgttcagtttcctttaatgacccccatctcccttgaaggataggtgcaggcagctaggtgactggcaagacatgttcacttgaagatcttgccttgattgacggctttgccaacgtgctggaaggccccctcccaggaaaagtactctcgaacgagggtctgggtctcctcgctaccaggatccagtttccgccatgtatatgactcatagtccacctgccaatctggactcagcggaaaggcaagatcttggcctcggaagacccaaaccccagaaatggagctgctgttgttggttccaaacaggataacactagcaaaggcattctttctcagtttgtccaatcgctgaaacatcccagtgatgaggttacagctcatgaaggtctgggtgagctcttcagggaagcggtactcagcataccacagggaccagccatccttatcaaaatgctcccaaaaatatggcagcgccacagagagggtgtcctcattggagtactttcgcttaaactcatccaacacaaagg

SEQ ID NO: 133 - DNA, 442 bp, Rattus norvegicus
tttttttttttttttttgacattccacaaagaaatatttattgagcgcctgccacgtgccaggcaccgtttaccccccaatgagaaaacaaaacggaacaaaaacaggacagaggcagcagaaagaaacaaagggcagttggaaaaaagctaagggaactaagcgcttgaagagctcctggatggccgtgctgtttccgatgaaggtgactgccatcttgaggcctcgcggtgggatgtcacagacagccgtcttgacgttgttggggatccattccacgaagtagctgctattcttattctgcacgttgagcatttgctcatctacctccttcatggacatccgtccacggaagacagccgcaaccgtgaggtaccggccgtggcgtgggtcacaggcggccatcatgttcttggcgtcgaagacctgctgggtgagttca

SEQ ID NO: 134 - DNA, 358 bp, Rattus norvegicus
tttttttttttttttttgggtgagtgagtttctgtacgagtttattttatattacacatacattcagaggatatgcatctgacgaattctctatcaatcttacatggtatgtgtttcacatttgcctgagagcctgggcatgtgatgcttcctttaatcctagcttgttgggaagacataagtaagtagatctgagttcacggacagtctagtcactcgcgggagttctaagacagccacggctacacgattaaaactaatctctgactataggggataaatccagatttccagtgtgtctgaaaattcctaggctaatctttaagtcaatgtgggtttataggccaaactatgtgtc

SEQ ID NO: 135 - DNA, 393 bp, Rattus norvegicus
tttttttttttttttttcagtaattcaataatttattcctctaaaaaagtgtgtaaaagtatatagctctcatccacaaggtatatatgaatgacatttaaaatggaggcctttgtcattgtttctttttatcaaagtctttagtgtattgaaccagcactgtgctgtagttcttaaatgaacgtcaaatagttttgtattcttcccaattgtctgctatatataaaagaagctcactgcaaaatgcttgaaggaaaaaggaaacaaaaaagaaaatcagaacttcccagaaatgtacagcttttacatttaaaaaaggctctgagagatacatacaggcatgccggaccagccctcccttctctcgaataccatcaataaagcctcgtgccg

SEQ ID NO: 136 - DNA, 430 bp, Rattus norvegicus
tttttttttttttttttagaggaaaaaatgttatttttatttcaataagtggttcaaaacttaatggcatttctgtaggttagtaaatgtggctctaattgcctgtcatttgttagatgaagtatggatcaaccagaagggccgtgtcgcattagcatcacctccagcagtagcagcaaggtcattgtcctcatttaggagcttcaggtagacgccgcgacaaagactctcatactaatagtcatcagaatatggataattagggtgttcagcagctatgttcacaggaaaatacctgaagtttctgttcaggccatctaggacttccatatcctcggaaggcaactgaaattcaaatacctgaatgttctctttcatctccttctgttcataagtttgggccagggcaacaaccccacgctgtacctgg

SEQ ID NO: 137 - DNA, 480 bp, Rattus norvegicus
tttttttttttttttttcagtacagaaatgtttaatggttgaattgtacactggctctgacatatccagaaaggcaacttttcatgttccaaaaatagattttatagaaagacttacatattcataaataggtaatgtgaaaattttcacaatgtgcctggcatccttgggctggcaattctgcccctgcccaggccctgcaggggtgagtttggctagaggcccactgctggcagtatcctgggataggataatctattcaatgtgaaccaggggcttccagtagatcccctccagctggggtctgtgtccttggaaacagacttccacccaaagagacatgaagcccctcctctagtacctttagtgggcaagacctctacaactgctgcgccccctggccctaccagcccttctgtgggaacttcctcaccaacaacatcaacctccacccccgcctgctgttcagtaactgttcaa

SEQ ID NO: 138 - DNA, 462 bp, Rattus norvegicus
tttttttttttttttttaaaaatagtttatttatttttaaaaccattaaggcaaaactgtaccctgaaattaactctttacattcctcagcttacagtaggatgttccaaacatacaggttcccataaattcaggatataaatcaatgcatacagtcagttcggtctcctacggagaaaacgaagactcgattttttttttttaaattaagattaagttatagccattttctaattgcccggaaccaatcagctcatgtgactagaaaattctatttgcccttctgtgttcaccctgattcctgatgtcctggcgagccctgtatccacaacaagctgggggttggggtgtgtgtgtgaggatgctggtaccggctcgacaagtcttattcaggcctgttagtatcacaggggtgaagggctgcaagctcccaggtctgataggatggcaccaaggacatta

SEQ ID NO: 139 - DNA, 505 bp, Rattus norvegicus
tttttttttttttttttgaaggtttcaaaggtactttatttctttattttttttcttcaatatgccatgttttaatgagtacatgattctttgacttggcattcatttatgagttggttttttgaaacaattccttgattattgtatcagctggcatgactactgatctctccattcctttggggtgactctgccaacaggggacaggttccattctattccaatttgtgtggctgtatatgtccatgcagaaatacagaagatgcttccacctgctaatacagcatttccatatttgtcatggaaagtaggtgtcttcttctgatggctctgccttgccaccacttgctgaatgcttcgaacttggagacgacttagtgcgtttttggccaagggcaacatcgcggagacaaggatggaactgcggtgactacagctgctacctgggtgcaaattcaccccagctacccttgcagagtcctgaaaaacaaataaaaaaaacctc

SEQ ID NO: 140 - DNA, 377 bp, Rattus norvegicus
tttttttttttttttttacagactccagaggctttgttttattgtgcaattctcttccttggtgaagtgccgtaagctgtggtggtattacacatggtgatgggaaaggtacagctgcccgtggggaagaaaatgcttggtaaaactatcttccaaaaagtgtgcacactagacctgcccctgatactacgaggtcctgtaaggggcaagttgcaagactctggttgtctggggaatcatggacagcaagaggggctggcaaagacgggcaagggaaagaacaaaaaatctccattaacaagttgggtccaactggttggttcttggaacctcctttcctgcactgatttagatcctggagtcacagttctggctcc

SEQ ID NO: 141 - DNA, 518 bp, Rattus norvegicus
tttttttttttttttttcaagatgtatttatttattatatataagtacactgtaactgtcttcagatacaccagaagagggcatctgatcccattacagatggttgtgagccaccatgtggttgctgggatttgaactcaggacctctggaagaggagtcggtgctctcaaccgctgagccatctctccagcccttagtttaatttttacgttctgtgaatgggtgtcttgcctgcatatatgtgtaccacattcatgcgattctcttagcagccagaagaaggcatcaggtcctttgggactagagttagaaatggttgtgactcccactaccaagtgggaggtgggaattgaacccagatcctcacgagagaggcatctccagtttctgaggtttatgcttaaattggcgtcaagagttccacatagctaagctgtccaggttaaagtatggcccttccagtcactgacccaacattgtcttggcttctaatctctcctgcaggatggacagacgt

SEQ ID NO: 142 - DNA, 585 bp, Rattus norvegicus
tttttttttttttttttcaattttgccaattttattgaaccaataaaattcctactaataacaatgaaataaattctgcaggtataaacgtgatacagtttaacaaaacccattgttctgtacctataaatagattttcaaaatgtcatagaaagtgcagttatgaattgttaacatgttaatacacagctcctttatttcaggtgtgtttgtcttgattcattaacagttccttctttatctgttcaaataatattacccatccctcgaaaaacaaaaggacagccgcagaacgaggaacaacgcttctttctggtttgcaggagctgagccaagcggcaaggccaggtttcccaggtgacctaacagggttctcatctcattcaccttgaccagactgtgcgtgtgcccgttcaattcatagaaagatgccgccaggtggcctgggatttgcttccaatgttcatcttgctttgggtaaaaagagtaaatgtgaagaggaaggaaaaatcctacttcctctctcgcagagacatccaaatgcaaaggaaatgtgtgcactagatgtagatcaccatccttggt

SEQ ID NO: 143 - DNA, 495 bp, Rattus norvegicus
tttttttttaattttttacgttttagaaaaatttattttatatacaacttatttgaaaattttcagtatgaacaatttcaacagagtcctttagatgcaatttcttttgggttcactgcaacactttttgtaatattatatgttttatagatgccaataagtctatctgaaatctcaaacatattatttcgaagagagattattatgaactgtgcattttttgtttgctcgtatatatagaatgcaacaatagacacgtttttaaaatccagagcggcatcaatctcatccatgaagtacaggggagtgggtttgtagtggtgaagggcaaacaccaaggccaatgagctaagggttttctcgcctcctgaaaggttaaagatcttcttccaacttttcttaggtggtcgaacactgaacatgattccttcagaaaaaggatctaaactatccacaagctccagttcagcatcccctcccaaagtgagcatttgc

SEQ ID NO: 144 - DNA, 437 bp, Rattus norvegicus
tttttttttttttttttggagagagcacctttatttgaaataacatcacaggtctctgatcacctcttggagacagagaatagctcagggagagcctacagggcccaggggatcaggttccagccttgcataagcaccaagaactttagggacggtcactcctgccaggcagggagacatacccaagggtggtcctttctatcctctgagtgctggggccaaggccaggttagaggagcaccaggttatgtgggtcataagagaccaagcaccagtcagtgaggtcttcagggctgtggaatagttcttctgtggaacctgctatgaccccagcctcaaggtgtgtggacacggccgctagcaagcctagggtataggctgtttgtaaaagggacacggatttgtgtcatccatcagatagcagggctctagagata

SEQ ID NO: 145 - DNA, 494 bp, Rattus norvegicus
tttttttttttttttttaaattagcttctcaatcatcatctggaaagaaaacattctgagcaacatcattaaaaacagctctgataaagcacggtcactactacgtatcataaagcaggtacaagctattttacatccacagaggtatgatacagtactgtcctacatctataatactagaggatacaatttaaaaggcattatttgagacttgattctacttttccagcagagggcccaaaggatggtgtgtgacacagctttgtaaagaaacatactctagacaggatttcctttcactagtggcacagttctaaggattcattctctccatgaatgtcagctaaaaccgttattaaaaaaatgaaatatccctaaaacaaaaccgtataaccaccggattcacatgaagatgacctagtggagacaagctggacctcaccttaccaacaagctatcaaatctgttacgtttaaacagtgagacctccaagg

SEQ ID NO: 146 - DNA, 492 bp, Rattus norvegicus
tttttttttttttttttagcaatataacatcaattttattttaaaaaacaaaacccaatccacctgacctgtctgtccctcaagggacctaatagagacctcaggaagggctagctctggccaagcaggggtaggttgtcaggtgtcaaagaagacactgtgctcatggactctgctccctctctcagcccttgtcttttgctcctgacaagaggaacaactgatctgtggtcctacgagctctgctgtacttgaggaagacagcacgcccatcctcctggtctctttgctcccccttcaacggatactatccttctctccgccaccctgagcagatggtgaggactaaagtggtggccggggacaccaagtgtctacggagcccacagggctcagaccgtctgccccagtgacctctagtcactaccatcgggcaggatgcctgtggtgccaggcactgactgaattcctctctcacgccagccacactaa

SEQ ID NO: 147 - DNA, 580 bp, Rattus norvegicus
tttttttttttttttttctgatcttaattcattttattctacaaaatgctactcagtggaaagtaggaaagccaacaagacaacaagaacataaaacgagaacaaaccccgagggaaaataagttttaatatgttcttccctccatagcagcaagctctaaacagctttccttagtgcaaatactgtaggcttgtgtcacacacagtacacagaacaacgcaacacacaccaccacagatgcttctgagcagagatactcctcaaaaatttaaaactatacaaagattttttgagcacgtggtcctgcctggagaattcgactagagagaccctcctaggaccatttcaccattactgtaaaaacgggacaaaaggtccccagaaaggaaattagaattccccatggagccataaaaccttgtacaactcgtttgcctccagggtctaatagcaaatttcactgcacgtcattgacatatcccaaatacggatgcataaagcttgagtttctacgatataccaaaatacgatatatatacaactcccactgcaaaagaaaccctgatacctagtctttat

SEQ ID NO: 148 - DNA, 439 bp, Rattus norvegicus
cggacgcaaaggtttttttttattttttttcttcaaatatttaatcagtccggatacctctgtcttccaacccagttgggtaaaaactcttaagaaagcatgattaaaggggtcttcataaaaactgggctaagacgcagggaaggctgaggttagaaagactgaacataacatgtatctgaggccttctggaaggaattctatcactttaaaaactcaaaatgaacgagaaaaggttaaacactcatacaaattgtaagaacaactaaaacttctcttatgctgaaaataccagacgtgattttaaaatagactctttaaaaacctttgatcctgctgtgacgtgttcccatagccttctcagcacatgcaagaagcaaaatagctatacccagcatttcccatgagctcatgaggacttttgcaaagcagcaatgca

SEQ ID NO: 149 - DNA, 469 bp, Rattus norvegicus
  misc_feature (1)..(469): n = a or c or g or t
tttttttttttttttttaacaaaaacaagctcacatttatttttaccccaatgagaatgtacaagtgaaacaggatgagtaaatgtagtcaccagcagcccctgagccccttctcaacctctcccatgcttggccactgctagttggaaacgctttggagcagagtaatattatctcctttgagcatgatccgacccagttgttttcttgactttgttttagaatgaatttcttctgcatcatctaatacgaggttcatgtactcatcaaagccaataatacaaccctctatccgcatattcacttgttcatacagccacacctgaattcgagatctattttgcaagtatctgaagataaggttgatgggctgcaccatcaccttctgcaccttctggccctggccgcggtacgccatggtggaagtcacaaaanaaaaaaaaaaaaacctttcctcgtgccgaattct

SEQ ID NO: 150 - DNA, 475 bp, Rattus norvegicus
tttttttttttttttttatgagtatggaattaattaaaacttcgaatctttattttgtctggatctttgggcacaacaaaggctggccagcaggtccctcttgtcagtgatattgtctggcctagaagatgccaaaagaagccatgtccacaccacaccagtttggtgcactctgctgagaccacacttggcctctctctgaaaagacactcaaggctcagaacatttctgttcttcatggccgcctggctcacaggatgttccctcgtagtcctgggtcgccccgcaactgctctgagatttcacctaccgggagctgctgacccaggagctgagagtgggtggtttctgtgggctgagtgtgtgggattccatgctgttcgagcagacttgtcagtctttgtacctcccgtgacagctctgcgtgtgcctttctgcaaatgtccagagtctcaagccagcatcctcaaaaagt

SEQ ID NO: 151 - DNA, 420 bp, Rattus norvegicus
tttttttttttttttttccttcaagtgttcaagtttcataaaaagggaggagggaggagaaaggggcaaattaaaaacaaaaacacgacggatttaaacagaaacaaacaaacaacccccccccaaaaaacattgaaaaacaaaacaaacgagagaaacaaacacaagtgtatcgctcagagacaacggggttgacagagtcacacacggtttgtggtatgtacagcgattacagaggtgacgacgcggaggggggttgggggtcacatttgtgtttctgtctgttccaggcgcttggctacacgcacccacgagggggagtgcctccgtgcacacacaccccacacacaggctccgcatccccacgcgcacgcacactctcgcacactctccatggctcatccacacacagacacgccc

SEQ ID NO: 152 - DNA, 559 bp, Rattus norvegicus
tttttttttttttttttcacacagggttgcttttatttccacatccaacttgagcagaggccctgccacaacctgaacagctgtgaggtgctgggtgcctccagagtttctggcacagtaagtgttgggtgtgcagacttcctgatggccacatgacactggcccacacaggaacagcaagtccatgaatggaaatcccactgagctggaagtggaggctctggaaaccccatgggcagcagcaggagttaaaggagccaccaggaacactgcagtgaggctccaatgcagacagggctgataaaaacccaaacagggcattgtgagagcagaggctcgagtgtccccgctgaggacccggggctgaaggcacagagctgtgtcgggatggaagaaccctgggtgcactcgcagtccagagcacgaaagcacaggtgagaacccagcccgaggctctctgtgaagagtgtggccttggatcttgggcacggcacagtgacacacagtgctgaggtcaatcctgacttcccagaggaatgacctcttcagtgacaaaaaa

SEQ ID NO: 153 - DNA, 527 bp, Rattus norvegicus
tttttttttttttttttctgctttttaatgcctttattctacataaattactaccagagggctatgtttaaaaagcaagttagttggacagatgcaggacaaaaatgtgttcacccaattagaaaaggtgatgtttaaaagattacaacaaatgccaagtgtttgacgcatgcagcggccttaaccagagacatcgattcccactgttccaaagacacagaaacccgcacatcttactgcactccacctccagagacttcctattggtttcctttacaacagcacagaatcccaatgaaataaagcaggttattttaaagatttaagagccgttatcaaaaataaattacattttttcaggatacagaaatgctgctatgacggctgggaacccagcaacctttcaatggccgcattgatgtcgccccctgttgctatcagtgcttgtaagtttgcttcacggttcaagaatcccattgcactgagctgttccagatgctgttgaaatctgacttctggactctgca

SEQ ID NO: 154 - DNA, 438 bp, Rattus norvegicus
tttttttttttttctttctacattttattatttcaaatcatgtgaacaattccataaaacatgtgaaaaaagcaaggaagtgttcaacgctggaggtcccgggcctggggcgaaggcgtgaggggcctgaccctcagcaggcagcggcggttcctagattagcgctaaggagctacatttaggttaatggagcctgggcccaaggcttcagggcagggccctcagtgacattggcagttgtctggaacagcccttgggatccaattccgtggagggcagggcatggggccgcccaaagagggatgggtgtaaacaggcagacacactcaaggcacggaatcactggaaaggggctgggggcggcgggagggatgctggtcaagacctgacagttttaaataggtttctccaaaaagttttctagatttgcaattttcc

SEQ ID NO: 155 - DNA, 483 bp, Rattus norvegicus
tttttttttttttttttaaaaaaaaaaaacaaaccaaaaacgatcctttaataaaattagcccattgaatctccccacttcttaaggttctaaacttgtaatagctgcaaaagttccagttcagaagccagaggctcagtccagacagggattcaccgacttgtgctggtatctgggtgtttgggttgtagtttgagttaagggagagggatagctaggcccggctcctctagtcttctgcggcaggtatacaattcttctgtccacaggccaataggcgttccctgaccctttccagtttatcttggaaaaattggcttcacgttataacatgccggcctacaaatgacgacagggtcaactggtttgagaggccagtaagggggacacagagtgaaacagtatgatccgcttctcaccaaagtccggcaatcaactcacttctgaaaggtccaagagagggctaagcaccaagctgaaaac

SEQ ID NO: 156 - DNA, 514 bp, Rattus norvegicus
tttttttttttttttttgtgggttaaaaggctttattagggaaacatacaggggcaaggaccatccttgggagacctcaggacgctgtcctccaggttgctgggcaggtacagtccccaggagcccctgctcagaagcatctgacctgggaggcagtaggaggggtggcttctactagtgaaactgccccctgcccccccagtacttaagctgtggccctggcacccattccttgccagggatattggtaacaggaggcagtgactcatgcagcaggtctaaggccagggtcaccctgctgcttcccacaaacacaagtgccgctcaccagtctccactggggcctcgtctgggactgtgacctgcccagcctaggagtccactagccacccatccctcgctgctgctgctcctgctccaggcttcgctgcaggacctgctgctggttggcaatgacacgacggataccattgacaaagttgctctggtcatgcgggatgaggccaatgaagat

SEQ ID NO: 157 - DNA, 394 bp, Rattus norvegicus
tttttttttttttttttgttatgtaaggttctcttttatttaaaagatcattcacaaaataccatatccatagactcactttctgtcatagaactgaatgtgttaagtgtttggaattccattcttacagagtcagctgggcgcccagcagtgtggatggacgtgcctgttctgtcttttccgcattggagatggattagatcatctgaaagcatcagctttgattacaaccacgcaatgcatgtctccaattctgtgtgctcatcccagctggatacctaccaacaggccaccacagccgcctagctagtggccccagctctttcccagaagccaaggggtggctggcaggaagctgctggctaacgagcaagctgcgcacctcagcccttct

SEQ ID NO: 158 - DNA, 427 bp, Rattus norvegicus
tttttttttttttttttaagcttggcaaagtaatgacttttatttacaactgcatgtatcaagattacaatagaaacactagtattaccatctgaacaaaagcaatgatttattggtactggcaacaaataaaagattaacagtttccgaagagaatcaagcaattatccaggagctgcaaatctgactgcagtagtcttccagtgtcttttgtaccctaatggctttccccctttttgccaactacctagaaaaacaaaaataaaaagtacaattatgtataacttaatgattcagtttaaaatagatactaacgtagtaagttcaaaaagacttttgtccttttgtccttgtattaatttttaaccttgaatctttttcacatgcaatgtgattttattgtggcagcaaactgtaatatcccctt

SEQ ID NO: 159 - DNA, 445 bp, Rattus norvegicus
ttttattttttttttttgcacagaactagtttattcagtagtatgggggcgaaaaacaaaacaaaaacaaaactctaccatatttacagcaacaatcaaactgtacaatctgatggttagtatcaagttagcatccagtatctttgtatttttttaagtcaagtcatcagtagtttaaaaaaaaaatccagttaaatttttaaccctttacaggaattgctgaggggagagggcagagggcaggtgagaacccatggaagacaagccagaggccagccttccaggtgaggggcaggaacacctttcctgctgagagccttcactctaccacctgctctaaaggggaagtcagtgacaagtccggaatacatgctcagagggaagggtggctcgagtgaacggtggctggtaagaaccgaggggagtaagtggagcaagaggaagg

SEQ ID NO: 160 - DNA, 512 bp, Rattus norvegicus
tttttttttttttttttgtataaaaaagatttattgaaatttatcaatgacaaacagacataaaactcaaagtttggctcttctcaggggcgggagaaaaatgagttacagctgatctgtacaaatgagacacagggtaggaaacagcacgtcacttctaaagcaatctggaaggggggcgctgaaggcacacgcactctctaggagaaatctgcggccacttcagagtcccaccaggtaagaaaatacgagcttgcattccttttccgtgctcctatgtatttgagaaggaaaacaaacagaacaaaaacccagaggacacacagggcgcttccagagcttagatttgttaaaaggttctaagctggagcgcccgaggagtcctcctgccatttctgtaaaacaaattgctctaatattttacagaacaagatagaacaggttggcttttctgaagaagctgaaacacgaaggttcacttctttcccattttacgtgtctcctaaacctgc

SEQ ID NO: 161 - DNA, 403 bp, Rattus norvegicus
ttttcttttttttttttcaaagagcaagttttatttggtgaaggcaaacatcatccaaaagaaaccagacaggcaaggtgctgtgattagggagcctctggggccacacaggaatctcacactgggcaaggagcaggctcgagacacgtaaatgtcctcagccattcagcaccatccggacaagctccgccccatgggcccgtcaccccgacaggatatgcctcacaaatgcttcatagttaatgcaaccgttgctgtcctcatgccccgccactagcatctcgacttcttcctctgtcatcttctcccccagtgtgactaggacatgacggatttcagcacccatgacagtgccattcccttctttgtcaaacacacgaaggccttcaacataatcctcgta

SEQ ID NO: 162 - DNA, 450 bp, Rattus norvegicus
tctttttttttttttttctttttggaaaaccaaacatgctttattttattcttcacaatttatttaaacatctcacaggacacaataggtacaattcaattttttttctgcttgtccaagaaacaggacttcttcggaaccacggggaggaacgaaaatgaggctggcaaagaaacgaatgctgaatctagagaggagagaatctggggcaagtgttcttcattcctttagttggggataaggtgaacgagagggccgctaagtcaaattaagaatcccactcactgcacatcactatggaggatcgagtcttctgtaattcttctagctccatccacattctcctagtaggtctgggaagaatagtactagggttattaggaataatagtaatataaatacacctaggaggtctttaattgtataatatggatggaatgggattttgtc

SEQ ID NO: 163 - DNA, 519 bp, Rattus norvegicus
tttttttttttttttttaacgtgtgccaggtgccactttaattgagtcctcaccacagtgaggaagggtggaagacagtgattgcttccaggctaagccccatcggccctgaggtaaccaacctcgctccccacagtagaaacatgccttccttcccctgagaatcccatgcctgagccaacacagggaaggatgtgcacagaaaaataagagaagctcatcaagggagccaggggcatttctgaaatttttccagtgcaaagactagttgacctggaggtgtccctcctaatggcaatgataaaccccaatcattcccagctgaggccaagcccttccccagggagcctgagaccagggttcatgccccagggctcctccctgcagtgctcccaggaaagatcagcagcctgcccagccatggagagagcccgctgagcagatgcgtcttcctctttgctggcccctactacggcaggtgtacagccataaaggaccaggcagtacaggtgtggctgt

SEQ ID NO: 164 - DNA, 406 bp, Rattus norvegicus
ttttttttttttatttgaggtttatggcatacagtttaggtcaacacacatacagaagggggaagaggacatggaggtgtccgaagcaaagctgagtgacggaacacattcagtcagtaggtgtctatacaaagagtggtgggacatcaggaaaagctcccatggattcatgtgcacccatctggaggtaccagattcctccatggcagatccatgtgcagagctaagggaggaggccacttctgtcattccagttttagaagctccacatcaaaaacaagagtagcatgtggtgggatgatgcctggggagattatcagtttggctctctggcccacactcatctgggctaccccttcttcccagcctcggatcacctcctgcttgcctagtgtaaacttaaaag

SEQ ID NO: 165 - DNA, 404 bp, Rattus norvegicus
tttttttttttttttttgcttttaaaagattttattacaagcaggaaaccatgcacttccattgcaagccattgtaagcagaaagacagatacacttcaggcaaggtaggcttttattacattggctaatgctcatgttcaagtgaggctctggttcagtctgggctgccacctgccatgcctgtgatgtgggacagccagcacccacggctttgcggcctttcacgctcggatagctggcaacaaggcagtagtaaaaaggagtccaacttgtcagttttgagtagcagctaaggccttcccagcacagaggacaaagggcttgttatacaatgagatgatcatgacattctagtcacttgtaggaactccaccttagtctgggtcctaagttagcccacatc

SEQ ID NO: 166 - DNA, 446 bp, Rattus norvegicus
aaatagattcaataaaaagtcaaacacacacacaaacacatcttaaaatagactttagacacgaagtgcgtgtttcttctccacagtactgtgcagagggggagggcagggggcggaggttcctccctagtatccccacaggctgagtaccaggcggcggggccagctccgccgcgacaacccccttctcccctccctgttaaatacacaaatatattatattcaatatgaattcagtctctttccagaaaaaaaaaacatacaaaatacgctggaagggggccatgtaaacctcgaggtggaaggactgggcgcaggcgggcaggccagagtccagtgtgtgagctgcgccccagacctctgggcgagtgcccatcgcctgcccccctcaccccagtggggggcgggcgcccagccttcaaggctgggggtgtccgtatggagca

SEQ ID NO: 167 - DNA, 412 bp, Rattus norvegicus
gctctgaaaacactttattacacaaattacattcagattctgaaaaatagtgttctaacagtgtaaccatctaaaaataagacatcccggaaacacaccaactgaggagaaatttaaaaatgaatttaaatagagactttttaaaatttctctcattgcaatataatgttagtgattttaaaaaaatagaaggagatttagcagcttttcgtcgtgtggcaggttggttctcttcactgccacaggctgagaatgctgaacaggaaaggcaccaaagaaagacactggcgatgggtgtggactgggagaatactgtgttcaagcagagaatagggctatttacatccaccaactaaaacgtctccaaatgtgaatgagctaaacttccctcgggggttggagcgctaccttg

SEQ ID NO: 168 - DNA, 592 bp, Rattus norvegicus
acaggtgttaacatattaacctaaacttcactgtcacagaaagacatcccataaaattcagaaaatattcaggttgtggtgaggaagatcaagccttttgaagacttcaacgcactggatggaatggctcaagaatttcagcataagttttcttctctttctcaggaaaatcttctggatgtaattttatatacccgaacatgtcatggtccctcacagcatacagatagttttgacgttttaaataaaaatatccagcaaagaaaaaggaagtaacatacagaagctggcgatgcaaaccttagtagacaaccctgtagctcctcctccgggtaggacggcctcgcagccctcacctgctttcatcacaggtctcattcgcatcatgttgtccatcaggcccgtgcagtagcccaggaagccgatgtagacaagccgcgggtcgttcagcttgggcgggggcagtctccgggcctcatccggcaagaatcttaagggctcatggcccggccggccgttcatcatattgatgcggggttcacgtgaggtctgacctcgactccaactataagaaaaaccacgactacaaacc

SEQ ID NO: 169 - DNA, 474 bp, Rattus norvegicus
gatcaacaccttttattggttcacattttttttccagaaaaactgtaataaaaatacatggaattggaatttgggttacagtacattgtgcgattacagaacataaacgacgaagtgtactccttccatgggggcggaacatttcatcccaccaatagaatcacaacatgattaggcggctaccctacactgtcgttctgatctcagagactggcagacttaggagaaaaaaaaacaaaaaataaataaataaaactcaacagtccactcctttggttccctggtcttttctcctcttcaacacacggatgtggggcggatctgagggagcctcgtggggcaaggtgggtgccgctggctgaataccaggcaaacccgttccctgaggtggccccacaaggtactgggaaacgccactcagtactgcaggtggagatgggcagaagggaagacaagaaaactcgtgccgaattc

SEQ ID NO: 170 - DNA, 473 bp, Rattus norvegicus
  misc_feature (1)..(473): n = a or c or g or t
gcagacacaaacatgtaacctcaatatgagacgtctaactaaagcaagcacttcccagaccaaggcagcagctcttctaaggcttacgcttggcccagaattcttgatacatggaatagcccataccaagagtcatggcccccacaacaaagccctgggctgccacacgcatgtggatcaagtgaatagacatcttcgtgtttcccctgctcttcagcttgtagagcccatatgcaacaatcgctgcgaagccggccattccaatggggacaaacggtgtctccctagctttccgaataaacttggacccctgaccttcatcgtatgaagagagagaaaggtctgtgttggttgacattgtgatttcttgaagagtcttcggagaggagacgtcnctttcagtcnagccggcttctggcctccacccccgagtgctagaacacggcttcgcccgctgcggccactgcttgccc

SEQ ID NO: 171 - DNA, 484 bp, Rattus norvegicus
  misc_feature (1)..(484): n = a or c or g or t
actgtggctaaacagccacaattagcaactttaatataaagtttttaatacaaagttcaccacaaagaaagcagatgccatgcgtggaggcacgtggactgcagctgcctcatcctcaagtcccgggcttctggtgttttgtcctcggatccagcagttcccatgtggaggctgcatggcctctgtccttaacattgatgccgtgggtcatgaggtcctggcggagtgcgtcacatgcctccagcaagggctgcctctcctggagctgctgtttccgggcctccccggtggccccaggcgtggccagtgcatactggcggaccttaagcctgaagcgcactagttcatctaccacacagtgcanggctactgtgctgctgtctcctgaaacacactgtcgcttggccagagaaatccaacagtctcgaaaaactgctcaacgtaggcaacgatggccccaaacacagtgggacttctcgggcca

SEQ ID NO: 172 - DNA, 410 bp, Rattus norvegicus
aatacatgtcagaataataatgtgcaataaaatcattcatgtgtacatgccactaaaatagaaacaaaactgtccaggcgaatgaaagggaccagcaggagggtgaagggagagaaagaggaaagtaaatgtgtgtaaatagtgcacatggcatacatgtgtgtaaatagtgtaatgtgatgtacatgtgtgcaattatagtcacaggacatgatgtacttgtatgtaaatgccttcatgaaacccaccactatggatcatgcatatgtcatatgcaaataatgtgcagaaacggatgagagattgttattcaggcaggtgagtgtgctctagtctagtctgtcctccatgtctattactttcttatcgaagaaatccaggaagagcagtctctggatccgaaaagccat

SEQ ID NO: 173 - DNA, 388 bp, Rattus norvegicus
gagtggttccagcaagagaaggggaggcctgcccctcctcctggcaggcctagatgagtctctgccattgaaccgaggccaggaaggtacggatttgcataggctgcagtgtgattgaggtagggtccaaccgggaaggagcagggtaggagatgggaccagtatctgtcatccacttgagcctggaaaccctggataggggtgttaaagcggctgatgacttcctttccccagtcatctttcactgggattggtcccaccgtccactccagctccaaatgacgctgtccttcatacaggcgaatcacttgggaacaccaggctgaaaaattctggtgtacctcctgcaccaagtttgtcttcaccaaagtgacctgagcccagtggc

SEQ ID NO: 174 - DNA, 502 bp, Rattus norvegicus
cttgtagagtcttttatttgtttgtttgaaacagggtctcaaccactgtaacccctggatggcctggaactcactatttagaccaagttgaccgctaacatagaaataggcctccgagtactgggattaaagcggtgaagcacaatgttcagctcggaagtttgctaggggaatggggagcatgaatggaatggatgtcgaggcacctaaaatacattttttttctagacagtaacaagaatttggacgcaatagtgagatagtgaaaatcgggcttcttgtacattgaagcagggggcttgaagagttgtggccgagggacacgttttccctagcagagaccgtgttctttcctcaaactgcctctagatggtggtgctgttctggatgcagtccagtggataaggcttggcacagtgcacaaaacccctgcactgtagcagctgttgtaggcacggtcaggatcagaagcatacttttgatacaccggaatacagtctcc

SEQ ID NO: 175 - DNA, 582 bp, Rattus norvegicus
  misc_feature (1)..(582): n = a or c or g or t
cgccttgcggccgcaaaactttttttttttttttttttttttttgagcacgaggcctgtggctggctttattttattcacactggaacattaaaataaacttacaacatttactattgtgcgttctatgggtgaaactgtcattcgagaaaatgtacaagaattatcatttccatagcatagattaagtaaatgggttttaattttgccacatatactaatgattaaaaagtttctgaattcttagcactctgtttgccccatcagtgacatttatgctcaaaaagttggcaaataggaagtaggataccttatatttaaaacagtgtgctgttttagaaagtacaaaatttagcctataggtgtaactggatactggtttgcacataacagagagggcatcagctaaaggttattactttctaagggaaacctttaaaacttatgaaaaaaaaatcacttgagaagaaaccatcccttagtgggtcatcgtcttctactgtcaggtttgctgtncccgtgtaatgggcttgtcctgcaacttccactatgacggctttgaaatctcacacttttgcttcct

SEQ ID NO: 176 - DNA, 392 bp, Rattus norvegicus
agatcagaatgtgctttctcttcctctctccagactgtgctttctgagggactcatcccccacggcaatgctggtaatcacagacttgtccagctggatgataagctttgtgaagggctctgtgataaccttgagaaggtcaggggcatcacggccaccacggatgttgaaggaggcaaccacaagcccggtgacgtggtgcaggtagcccgtggcagcctccaggggcagcaggaccagaacagacagccagttaaagcagtcatgcactgttgcccctgcaaaagcccgcctgaagtcagtcctgtcccccgcctgcatcagggccacaatggtgttggtgacagaggtccctatgttggagcccatgattatcggaatggcggagctca

SEQ ID NO: 177 - DNA, 584 bp, Rattus norvegicus
aactcatacacaactacttgtcttctggtttgttgaagcagtaagtcagacaacacttgccacagtaatgcctgtcaaagtggctacccatgaaaactccagcaccacattcatcagaaggacattcccgacgaagtcggctgattttgccattttcatccaccttatagtatttcagcacagccaacttgaccttctttctcttatgcttgttcttctttggggtggtgtaagacttcttcttccttttcttagcgccaccacgaagtctcagcacgagatggagagtggactccttttgaatgttgtagtcagacaaagtacggccatcttccaactgcttaccagcaaagatcaacctctgctgatcaggaggaattccttccttatcctggatcttggcctttacattttctatagtgtccgagggttcaacctcgagcgtgatggtcttccctgtaagggtcttcacaaaaatctgcatcgtggcggctgctccacctgcattcgaaaggagacggattagacccgaccacaccagtgagagcgaccggtagagccactagccagagccgggccacagc

SEQ ID NO: 178 - DNA, 516 bp, Rattus norvegicus
aatacaagtaaaagggggcagggcaactccttccccctccaggtcaggaccaggagaatctgctgggctgtccccgggaccaaagaggaaaagagtgacatagaaactgaagcaaaggaagcttagtcacactcaggtgagggtgacagctcctcctggattttgtttccatttattaaaaaaaaaaagaaaagaaagaaagaaaaagccaccccctcactcccagcccattcctcacagccagggtcagaaagcagcatcagtgaggcgggttcctcacctctggttatctctggcccaggtcagcttgagccacctgccctcaccaggagagggtttcagttggcagttaggcttggggaagtctctacctggaccccccagaggcctgggagcacccccctcctcccaggaaagggaatgcagtgtctactgggctcagaggggtggcctcacccacctgacatgagtcctgattctcccatctcgaggacggcaggaagtttattgcaccag

SEQ ID NO: 179 - DNA, 558 bp, Rattus norvegicus
aaatggttcagaatcactgtgaggcttttagatgttcccattattcaaacaacccaaattaaaaacatacaactcacattttaagtaatataagcaaaataaaaattatctttaacaatgccttatattttgttttagtattctactatagacacataagaataattatttccattttctgcttccctcaaaactataaaatgctgttacatatttttgaaaaatcaaactccttcatatcctttcatcaattttatgttgaaaagagagttattttgaagcactggaattagtgttggaaaaataggtttagagtccaaagctggtgtgtttgcgaataagaacacaagctgacaagtgatttaaattccttagaaaccttcacagttctccatatgtacatgtggcagaaggatgaattgccagccaatatacatcagtgatcagttgcttacatttcaaagatcaaaacacttggtgggaagcctagaaggaaacacttaaagacatataattaagaactcttatctctgaaaagcaaagtccacattttagtta

SEQ ID NO: 180 - DNA, 593 bp, Rattus norvegicus
ccagtcatagtcttaaacagacactttattggaatcgttttaaaagcactctaagagggaaatctccttgcatcccagaggcgattgaaagttgtagacgggcagtggcggcacatgcctttaatcccccgattctggagactaaggcaggcagtttggtctacaaagtgagttccaggacagccagggctacacagagaaaccctgtcttgaagggaaaaaaaacaagatgatgaagaagaaaaagaaataacgtacagtttttacacattccatacatcacacacatatctgaagaatctaagcaatgcaaaacaaggcctgaggggaggcatgagaagtaaaggtatggtagggtaagaaagtgatgtcttcagagctgctttctcccctcagtagaggaaggaaacgtttatctatggcaccgaggattaaggctgggttggtaaagaggtgtaggggtcctttgggtacaaactgctgttccatgctttcatggaaccacctgaacgtggacacggtgccaggcattgctgagcacgcctcgaaggttccagattggggccacagtgtctggctgcacattgtaactg

SEQ ID NO: 181 - DNA, 599 bp, Rattus norvegicus
gagcgtcccggaagttttattgggttctggttgggtcagggtccccccttcatcatctagcgagccgcgctcagcgcccgttactgggcgcgctcagctgccccatcatgtcggccagcatgcgattgcacagcgcggcgtacggattgagcagcaccaactggcgccgtgcgaacgagctgcccagtctcgccgcctgctcgaagtctctgcgggcatcgtcgtcccgaccctgaaatcgtgccagcagcccgcgctgcacgaagctctggcgggcggcgcgaccccggccgccgctcaacgtcaccgcgcgctccaagtcctctagggcgcctgctacatccccctggagccgcctcgcttgggcacggttgttgtacgcagaggctctctcaggtagcaggctaatggctttgccaaacctctccagggctgtgtggaggtccccagcttctgctgccctcactccctgcaactccagggccttggattgctccaactgtgcttgagggaaaactccatcttcatctccctcctctgtttcttccaggtccaatccaacaacatctccaaagggggtattagggttgaggatggcc

SEQ ID NO: 182 - DNA, 542 bp, Rattus norvegicus
aaaaaatatatgtgcaaaagtgagtgtctaaatgttccctagagagctggcgaggctatacgtcggaatcttctttaacgagatttgcagtgtctttaaaggtgtcttctgtggcagtgtagcctggagtcaaatttctttttgaagctttggcagggagagaaggagacggagggggggccacagccacagcatcctttacctcactgtccatctctgcgtagattgggttctcaaagttcgttgtctgtttgggttttcgtttgaagatgttccattttttgccctgaatttcatcagctccaggggaggctggctttggctctggaactatctcagaaggatctatgggccttccataattctggttttccacattttctggtacagtcacctgtgcgcctgttgatggcccctgaactgccagggccactttggaagtgttgtccttggctgcatacattgggttttcaaatatcacaggctgcttgcccacctccatgacaaagtgttcattcatcgccatggatctgtccctcgtg

SEQ ID NO: 183 - DNA, 423 bp, Rattus norvegicus
ctgtctctctgaacacgggggagacacatgggaccagaggggagacaagtgtgaccatggggagggctggactggacaacgggatggcacatgtgaggggaaagacaggcgtgatgacgtgtaaccatgaagacgagtgtgaatacagagaaggcaggtggaaaggggagtggatgggtgtgactgcggggaaggcaggtttgaccttggtcgggagagacggtggcttcccccttactttaagaagggaaagctgtgaggtatcaacaacccaggcacttgaagaaggaggaactcggaagagaagtcccttagctgctgtggactaagcagactcttccatctccaacaggtcatccacatactccacaacctctccctcatcgtcgtccatgaggtgttcctgagcgaagtcatacagtt

SEQ ID NO: 184 - DNA, 555 bp, Rattus norvegicus
ccagggacctccgtagtcggtctccctatcccactcccaaacctcagagcaggaaatgggcttggctgagaagattcatgcttgatgaccaggggaggcgtgcagccccccaagaagaaggggaaaagaaaaacggggaggttgaaaagcagagaggtgcaccttcccttctgaggaagcaattctggtctgggaccagttgcaaggggttagtaagagaaacctaaggggtgcttacatttttattctggcaaatgaatctcttaaaaggctccctcctaggggtgcttacatttttattctggcaaatgaatctcttaaaaggctccctccttcgttcgggggaacagcacatgtacctgtgtcagcgtgagatgcaatgctacacaagaacgtggcattgggccaatcatgtggacccctgtgctgctcccaagggagaggttctgtttgggtgtgggataaatctaaacaagcatacactcgtgttatatgtggccttaagggtaggggagcaaaaggaatggacttctctgtagagcagctcaagaggga

SEQ ID NO: 185 - DNA, 518 bp, Rattus norvegicus
gaagagctttttagtagctaaatatggcaccacgtgactcagggcaatataaattacagtatgcaaaacacactgactggctgaggtaaagcgcaccgttcctgcctcgtgtccactgtgagggaaattgctcacatgctttaaaaaacatctccatcatatatatatatatgtaaaaaaataatcccctagaaaggccaccagagaggggggctacaacgcccaccctctaccatgtacggagcacccactggagctgggtagtgtagtgtccacccctactgcttgcccagagctctgtgtccaggcaaagatgctggcaatagggttggtactggtgggccggcccttctggtgttctcggtagtggcgggtgactgtcccgtgagcagcctcagcttcaatggtcttcccgtcagggcagaccagcacagatgtcatcaggccaagggagccaaatccttgagccaggatgtcagactgtacatctccgtcatagttcttgcaggcccacacaa

SEQ ID NO: 186 - DNA, 636 bp, Rattus norvegicus
gaaatttagaaacaagttttatttaagatctgaaatacaattcctaaaatatcaacttttcagaaaactgtggctacacaataatgcattgcctctatcatgttagaacgtgcattagactcaaatacaaaaaccaggaaacaaatcaccatccttcaacaatttgagcaaagatagaatgaatgcctaaggaacaacaaagatggacttgcagaggatgggctgtttacagacgtcaagcaccataaaaaaaaaaaaagaagcacaaatgcgtgggtttccaggtatatacagtaagttgaacctttggcactaggaaccagggcatctcatcacgtagcattaacacatattagaaaactgtgtagtgtcaaagggatagaaccaccagcattcaagcaatgttgtcaactaggcaataaaatggtctactgaacttcttctttgtctaattactgcatacactggtagcaactttgaaatgaggaaaggagctgggcactccttttattttctgtctacaacagaacaggaaacaaactgaaacataagccctgttttacatcgacagttttaaagaacatcaattatacaatgagagggactaaacagaagtgtttacagataccagacaat

SEQ ID NO: 187 - DNA, 609 bp, Rattus norvegicus
ggagctcttgcaaggatttatttgctacagaattgctttcataccccagcgagctggactaaggacttctgggtctaaaaggatttaggtcacttcatgttttcaagtgctgtgacattcaaaaagcaattttggtagggcagagatggggtagagtagcaccatttgccatgtggtaagaggcgagaaaaataatcagtaatattaaacgtctaagaatagagaaggaaagaatactttaaagttcccatctggacagtccctgagctgaaatcacatttatgtgtgaagagaaatgtttgggctgtgaccgtgaagtgacagatgctgaccttgggcttggctggtgaaagcttccagacactctgaatgacaggatatacgccactcatctggctgattctggcacgtgtcctaaatgtctcctaaatcccaactctcctggttctctgaaaggcctgtggtcatctgatccccaatacttctttttatttttgagacagggtctctctacatagccctggctgtcctggagctccatgtagatcaggctagcctcgaactcacagagatcctcctgctcctgcttcccaagtgctgcccaatact

SEQ ID NO: 188 - DNA, 620 bp, Rattus norvegicus
aaaaagttttaacaatgatgtcggacaggaagttatcagacggtcatccacttgcttcacaagagcactaaaggaaaaggagtccccggggtcctcggaggtttaaagtctcagtgcagaagccccagagtccccatcagttgcggaggaagtgccacacttcttcttctacactgctttctttactcattgaaggtgttgggatcgattcaactagtgaccttgcttcctctgtagtgcagtggaaagggctatcacagatgtgcacgttcacacaactgatagctcccttgtcacacttcttcatcaccatctctttccaatgttcatgtgcagagttaataacttcgagggcaaaagccttgtttttgaattctccattaaaagcaaacttgttttctggttttccatctggtaccttatagagtctaaaccaattgacagtggcttctaggtaacctggtttgaacttcttaacatcatcaatatcatgaaatttttcagcctcaggatcattcacattgatagcaattattttccaatctgtttcactctgatcgataagtgccaaagtccccaggatcttcacatggaccacgtctccacgggaaagaaccttg

SEQ ID NO: 189 - DNA, 475 bp, Rattus norvegicus
agaggaaaaaatgttatttttatttcaataagtggttcaaaacttaatggcatttctgtaggttagtaaatgtggctctaattgcctgtcatttgctagatgaagtatggatcaaccagaagggccgtgtcgctttagcatcacctccagcagtagcagcaaggtcattgtcctcatttaggagcttcaggtagacgccgcgacaaagactctcatactaatagtcatcagaatatggataattagggtgttcagcaactatgttcacaggaaaatacctgaagtttctgttcaggccatctaggacttccatatcctcggtaggcaactgaaattcaaatacctgaatgttctctttcaactccttctgttcataaggttgggtcagggcaacaatcccacgctgtacctggtagcgaagggcaaactgagctggacttcgattgcgttttttgggcatgccaccatgaactgg

SEQ ID NO: 190 - DNA, 591 bp, Rattus norvegicus
aacaaacacctaatatttattaataaattagtatacttgaaggcatttttctgatatcagttcctcaccactaagcccacccacacaaaggcagtgggcgtctagctctgcattagagtctgacaactgagcatcagaggacaggttgataaatgagagagcgtagttgcaaatttatcggacaggagttcttacagctgcagccatttttaacgaaagtggttggatgacaaaggaaacccagcaaggccttgagggcagactggacctatagactatgtgtattgagagagagagagagagagagagagagagagagagagagagagagagaggaataaaaaaaataagagaaatatcttttaaagcaaagctgggcataaagtggctttccaaggtgcagcaaaggtgttcctaaaagatgaagatcgagttctttggcggcccaggtgtcaagccactgaaacagcaagtcctggggacttaaggatttcattctccagcccagagcttagcagcattaacgggagcacaagttacaagcagtgtacggtgtccagacgagaaccatacagcgagcgatagagagtg

SEQ ID NO: 191 - DNA, 583 bp, Rattus norvegicus
  misc_feature (1)..(583): n = a or c or g or t
acagggtccagtctagctctctgagcctttattactggacaaagagctgccatttggagtattaccatggtcgtcctgtaaagtaagtgctcaggctttggggacatgcctggtgacagtgtctccactccaacaaggtgaaggactcttggtccccagtgcatcttgggttctgggtcctttctccgtgagatcagatggagctggggtagacctcccagctggggctgcttagatcactcacatggctgtcttcaggggcacactgtctgccggctgatccaggtccttcctcgccagggccaggtgtgtgaagacaagaatgaggatgaaacctatcgctgccagggtgcccaagaggacacccaccgctgacagcttcgtgggcattcccttcatgcgacccaccttgcgcatgcattgaccctccacattgcagcgacacacgatcacttggacttggagttgccacatttgggcatcatggtggacaaccacaggtactgtgtattcaccaggctctacccagtgcaatgccaaggtgaggtangcggggtgtacagaggtgtcggctgggcccgga

SEQ ID NO: 192 - DNA, 614 bp, Rattus norvegicus
gagaacatgatgaactcatttattactcaaatggttgcattccattcaagagcacttaatacagaccattcaagagcacttaattgattgaaattaaagagaccaattggcatgggacttttaaaaatacaacttattccttttaagttattacttaaactatctagatcttctacatattaaaatagaagtgagaaaatagatctttggaatctagagtctagagtgaaggctaaaaacctgatatggaattggcatgatcaatccagactacggctaaaatgcaagagaacaggtcaggagttgatcaaagtttcaaaatttgtcacatttggtggaaaaataaaacactaaatgcatgtgcctgtgatgatcaaacggcataatattcttcagaccaaaacatatcctgaaatcttgaacattcaacttctgagctcatttctagctcccgaaagggggttgcaaaatccaatgggattgcatctacagtgaggccgctctctcactgctgacaaaatactctgctttttggcaatggcaatgataaacaagtagatgatgagaactcccgatgctttttgagaatcaagggttgctgatcttgaaaatct

SEQ ID NO: 193 - DNA, 480 bp, Rattus norvegicus
ggtacaagaagcattttccccccagttcccatccaggaagactgaggtctgaaggtggatcctctttctatcccatctcattactggttgagaacagctcctaaaatacaagtcttggaacctttgcgaattggcttgtaaggagtatgtatctgcaacatgtatggcctgcggcttactcaaacatgtctggttacttgtccttctatctagtctccactccttcctgagatgagaggcctgtgttgctggaggaaaagtggctggtagcatttgcctgattcagtgcataaagaaatgtgactgggagccacagccttcaaaaggtgaagctagggttgctgtgtgtggagtcctaggccatcctgggctacatggtttcaggccagttgacacagtgagacccagctttacacaacactttattctgcaagcacaggtatgataaatgggaagattttgaatcctggaactgttgct

SEQ ID NO: 194 - DNA, 576 bp, Rattus norvegicus
aaagaacatcccattcaacactggctttattactgggcgggggcaacagatccttggcagtggttgggctgaaagctatgagggttggaaggcctggggctcagctttcaccaggcagagcgggcacactagcaagtgcagcaactaggcgtgtatatatgtcaactccacgtagaaacacagcctcgtgcagtcgttcgttatggtcatgtagtaacacgggtgtgcggttcatgggcgagaagcccagagctgggatccccaccgctcggatataacggctgtcagtggcagcaggaaagatctccggctccagagtgaggttcatttccttgcaggccccgctgaaagctgcccaccaggggtccgtatcatcagtgggtgtcattcgaggctctgtaaacttctgagcaaactcaaaggtgaccccctctcccgcttcctggcaccagctctgcagctgcttctcgaaggccttcatgtctacatctggcgccactcggaagtcaaaacaggcactcatggtaccaggtaccacattataggccacaccaccttcgggcttagtcagattca

SEQ ID NO: 195 - DNA, 599 bp, Rattus norvegicus
agtatggtcacaagtttgacacctacatgtcgccattaacagagctgacgacaaatattggaaataagtgaattactgaagtatggcaagatttaaaatgtcaacttggagtgatcatgcaagcccatgcattggtgcctgcgccctaattgcaggacccactctgctcatccttgtggctctgtaccctcagcggggttgggtagggccaccctgccttttcgcagatccagaattttaagggcaagtgtggagccttccttggagcatggtcgccatgcctggtttctgcttggggtaaaactgtggctattgctagtatgagccgcaggattcccagggcttgtgctaacagagtgttctcgtgtccctgcaaaaggcctccaggcagttttgcatctgtgtttcctcctggggagtctacaagtgaggtgcacagtcttccagcatgctgtcagtgatgtagctggacccaaggtgggactcgtagtaattcttttcatcaaaggtattgacagtccaactaacaacctggattcctttggctgaccacttcttcaaatagtacggggagacaaaatccttctgcatgaggaagg

SEQ ID NO: 196 - DNA, 550 bp, Rattus norvegicus
gaaagaatgcactttttagtagatatgagtgtgagactcttgtctcgttattgctggtgtgcttctcggtctctggcagcagtgtaattatctgcgcatgcctgacctgcagtcaggcggtagaggggccaagcatctccgctccgggcagcagtactggttgtgcgtctttgactccacattagcgtgctccttcagtgttgccttcctcctgccttctgtttattccacgcatctcagcagaggaaacagcagcgctgctcctaaattcactctaagccactgacaggaagaatttgggctgtgctataaagtttccaatatgtctcgacattgttctccagctggtggtgatacttggggatacgatggcatctttactaatggggacaatgtatgcatgaattataaaccagagacgggagagatggccaagtggttaagagtgcttcttgcagcagatccaagttcaggtcccagggcccacatcaaaatcacctgtaattctagttgcaggggatcagataccctcttctggttccgtgtgtgc

SEQ ID NO: 197 - DNA, 569 bp, Rattus norvegicus
aagcagaaaaacgtttatttctatcaaattccatacaaatcaatcttcaagcaagataacaaaacaatcaattaatacaatgaatagttaggacagcacatacagaacagactctggattaagcacatacgccaaaatcatcttgaacaccaactgtcactgaaggaaagctgatgtgtcagctcccgggggacttaagccaacattgcattaaagactgccttgaacttggggggatcacagtgaaacgccatcacagctcaacatagtcccccagacatccgttcagctcagaaaacaaaattggcaaattcagtagtacaagttctcataaaactagagaagccttgagccccaccatttcttgcagttcacacaaagcccgggtttcccatttttcttcccttttcccgaatcccagagagaaggtgcagtactcttttcaaaggttttaaacaagagtcttttattgaaagatgttgtgcttcctacaattgtctgtcactagagggagtccatgtggagccgtgggcaatggcttactcacttaacctgtctctcacacccaa

SEQ ID NO: 198 - DNA, 216 bp, Rattus norvegicus
agagatccagtttgacgttttattaggtccagccctctgctacctgagcagtttcctcatcatccccagggatgggcttctatactcccgcccaaagtggttccaatggtttaggtagttaaagagctggtagagcagcaggcgtttgtcgaaccctggagcctttgggatcttctgatggtaggcagtgaagaatgatctggggaaccccccaag

SEQ ID NO: 199 - DNA, 102 bp, Rattus norvegicus
agcacaacaaaggagcccttatttattatgtgcaaggccctaggttcaacctccatacccccaaagaccaaaaaaattaaacggatgtgtaatgtacaactg

SEQ ID NO: 200 - DNA, 443 bp, Rattus norvegicus
caccagttaaatttaagaacctctctcgtctctattaacagataggaagcttcagggaccaggtactttgaggagctttctgagccagtgaaagaaaacaaaatatttcctggaactggtaagcttgctgttttcagagtgtcaacaagcaaacacacacgccacacacgtacctcgtgaaaacaatgccgctctggcccccggccacactgcctgcaggcactgctgcgtgtccttgtcagtgaatgttaatgcagaccactgggagctgaaggcgagggagctccctgagggagtgtaggcagcagccctgccaccagcttctagagatctagatgtgagctgcaatctgcgactccatcttggcctgagcagggctggaaggagcacaacagcacgtaccagtgtatggggaaaagaactgacatggctggctccggctg

SEQ ID NO: 201 - DNA, 363 bp, Rattus norvegicus
aagtacactgtcttcagacacaccagaagagggcatcagatctcagtacagatgattccgagccaccgtgtggttgctgggatttgaactcaggacctctggaagagcagtcagtgcttttaaccgctgagccatctctccagccctctactgaaattcttgaaggagttccactcaccagaaagctggctccgaccctcaaggctccagtcccggaaatggtctgcacagttacaaaccggccgcttttcaacacttcgctgttctcgcccagggccagttctgcagaagccttacaaaaatcagccagtcccccgatgggtaggtattctttgtccaaatttttcccagcaatctgggcct

SEQ ID NO: 202 - DNA, 421 bp, Rattus norvegicus
  misc_feature (1)..(421): n = a or c or g or t
ctctgataaatcaggactaagtttacgagtggtggtgacgcagagaggcatggagagggtgggctgaagtgtcaggggtggggcagtagtgtttcctccctgaccccttcgtcctcttctacaacagactgccacagtccagaataggtgattcctctaccgtgtctgttcaactgaagaaagaaacagtcagttacaacaagacacacaatgggaacacacacacacacacacacacacacacacacacacacacaccaagccggcactcactgtangaggaaatgtcgatctcatcgggcagctcactgatgttgacctcgaaacggtcctgcacgtcattcaagatcttggcatcgttctcgtctgacacaaatgtgatggccaagcccttggtgccaaaccggcccgctctggccac

SEQ ID NO: 203 - DNA, 487 bp, Rattus norvegicus
  misc_feature (1)..(487): n = a or c or g or t
ggaaatccaaactattttttaaaacaaaatattatttaaatattatgaatctctgaagtcatgagacttatctctccaaaagggaaggacccatggtttctattttttatgcagcattttcaaatacacatgtcaatatatatttcataaactactaaaaaataaaaccctttatcctctgaggttattgatgtgtcctaggtctccaacacatctcattaaacagtaagttctattcatcttcatgaatgaggtgggaactagactaaaaaataggattttaatccctgaggtgtcagttaaaatgcagaggttgccaagattttttttttcatttaaaaattagctttaaataattagcatggatcatgctatctcaatcaaaaccacttcctctacacggagtcctttagaaaattacattttctgggttatggtcaacctgatgtcncagctctccagctatgagactttttttttccttttg

SEQ ID NO: 204 - DNA, 606 bp, Rattus norvegicus
gaacctcacacagcagaatttagaaatggcaacccactcctttaggacatttagtggcaaacaatgtcactgcctgtctttcataaggcgagttcacattcacagatcactagagagcagacctggaaactccaggaagtacatgtgctgtcttccacacattcttggaagcccactttgatagaaactcaccatggatttcctatagagaactctccccccccccccacctcccctgctttatttactgaaagtacagaattgaaagtttctccccactttatggttctccacaatgggtaacagaagattcagtttggaaacctacaaaagatgtttatcattctagcatggagcccacactgacactaccttgctgatcacagaccctgcagagaccctgcagtcaccaacacataattcgtttcaaagaaagccagtcagcagggcgctgtgatggatggaggggcagaatgctggcgaaggcacagagtaaagaatcccgagaatgttttggtgccatttccatttaaggagccagtagtatagcgagcgacctacgcgacttcggctgtgaccacgccacaatctttctacggaactgca

SEQ ID NO: 205 - DNA, 592 bp, Rattus norvegicus
caggcaagagcacaactttattttcacctctaaaagtaaaccacaattgataacaacaaaggagactgtgcagttcaactttttattttaataaaaccagaatatgcagagcacatgcggtgctagcatctaaactaatacaataagcaagtactaaagctacagtgacttgagggtcaatctttacgttcagcaagtttaaacccattcttaactttgaaacataactgaaaacattgcttgctgataagacttgctccaatgctatcgctgaatgtccaagtcactgaatatgccaatacaacaaagataaccacatgtttgaggattgcaatgtgccagacattcactgaaaaaaaatacaactaaacaaaactcacacaacaaacatctgagaatctggacactttgtatcagtgtttttgaagtgtttcattaatatcttaagacaagtgtatcaaaaccttggcatgatttagtttcaagtcgccaattttgtttttactaacatcagaaagttatggctacaccgccaatgccgggtctgcttaatttgacttaagagtttattatggcttaacattaaaagctc

SEQ ID NO: 206 - DNA, 433 bp, Rattus norvegicus
cagggctaaggacctttattgagcacacggcccctgatggtgctgacggagaaaccttaggctttccttcccagcagcctccgccacagttcttggctgagtagtgcctgctccctccgggcgccctgcagcacactcctgttctcctgggctcttcggatcaggtaggatatcacctcttccaggcagccataggggatagacttatataccatgtatccagcttgccctaatgccagggagacgtggtcacacatgcccagaagttgtccgaagcagacaggcccatccagaggaatgcccagctcccacatgctgcagaaagggtcacattgtcaatccagagagtggctacagcgcctcgttgcctggcgaatggattcttcattgtgggaagccacatgaggtggcaccggggaccgtggttggacac

SEQ ID NO: 207 - DNA, 363 bp, Rattus norvegicus
aagaaccatcttttattgggggaggggtcatcaatccttcttggccgccgccttccgcatggctgccagcacgttgctcagctcctccctctttctcttggcgcggatgtgcgtgcccaccctcttcttgataaacttgagtgctcgcttgtccttggacaccttgagcagctccatggcacgccgctcgtagggcgcgaagccgcacacctcccggatcatatctcgcacgaacttggtgtgcttggtgaggcgcccgcggcggcggctgtgtctcggcttgctgacgtttttcgtcactttgtggcctttgttgaggcccacggccatggggtagcgcagggccatggctgcagctttccg

SEQ ID NO: 208 - DNA, 443 bp, Rattus norvegicus
  misc_feature (1)..(443): n = a or c or g or t
agacataattaatgttacagtaaaaataggcatttactcatatttgtcttgttttagccactttaatttctttcatctcccctccccctaaggttttctcaaagcacattatcattttacaaatacagtgccaaggtcctgagtccactttgcaagaatcttcttcacattcacggaaagcagttacttagtgcagagttctcatttccacttaactgtacacggctttatcggtgctgagacactggcccacctgctggccagtgtctcccacttcacacacctaaaccaagctcaagacaggaaggctgagccgtgaagagcatcnccacancctctccactggcccgatagctctttcccgcccctcccagttgtcctgagaaaaatcagatttgtcacagaaaactgacattcctacattcataggcagaagaatttta

SEQ ID NO: 209 - DNA, 490 bp, Rattus norvegicus
ggcgggcgggtgttgttttatttcagtctgggcatgatgcgtatgaacaggatcatgctgatgaacacgaagcacacgacgatgagcatggcccacagcagccagttcaccgacttctgtgcgtgctgctccagccgctctgactccagcttcagcttctccaggttctggtctgccatcttgagcgaatgtgacagggtctggttgtccttcttgatgacactctgggcagccagtgtgttggtcttcaggctgcgggccaagcctagcatctcctcagccagcttttcctggagaccctggtgcctctggaggacgaggtctagctcggacgctgactgcttctcatctgcaggtctaggccccttcacaactcgcttcctcatgtctgcctccagctctccagaggactccgtgcccaacagctcactccgcatctcactggtgtaacgtgctctagactgcagatgtacagtcttggtggcaggca

SEQ ID NO: 210 - DNA, 386 bp, Rattus norvegicus
gaggtataaaaatctgtatttatattacaatgacataatgacacagcacagccccatctgttagacaggtgggatggggtcccattccagtctgcagctcaggtctcataactcacccactgcactggcaccaggccccttgtgtagccccagactctggcacggaacctgccctagaacagcaagctcaaccacctgcaggttagaaatacagaggcagacctagggcccatatggagacaaaacctccgtgtcctctcctgctagacaagctgggtctgcagcaggatggtgggtctggtacatctggaccacctcctacgaaagaggcccaagcctgagcctggagttgcagactctgttatggagcacacgtggctcacatg

SEQ ID NO: 211 - DNA, 368 bp, Rattus norvegicus
gacagtcaaaaaggattttatttaaaccccgactctcccaaagtgactgtgtgtgcagggctgtttccagaagtaggtacattgaggctttaagagaggggaaagacattgctaaaatcacccatgtgaggcaccaacatataagcaacaaaacaaagtcccagagagagggtttgggtaggtgagagttgctagcacacatactgaaaataagcagttttcagaagaaaaagtgtgagatgaactaagaagtaggcaactgtaaccctcaaactagaaacaaacaaacctgggcaacaagccaactgagaagtctggacaccagacttacaaagtagtccttatacatgtgttcccagagctaaagc

SEQ ID NO: 212 - DNA, 632 bp, Rattus norvegicus
cggccgccaaaatttttttttttttttttttttttttttttaggtacgaggctgacgccagataagtttttattatatttaaaaaacagtggagctggaagtaagggcgggtcgttgaaggcgactgagaggtgaaaggcctcccgttcctcagtggcaggatctggacccactgcctaggccgggtttaatccagccgagatgctggaaagcagagcacacagttgtgcccatcagggcaaagagggcaagagagctcacagctcctcgataccgcttgctagggtctcccgtgtagtagccatatgcgtaaagaactcgcccaataatccacgccacgcccaggccagaagctatgcgcgggtggtaaacacctcccacggttaggaagaataggaagggagggtacacctccaacgtgttctggtgggcgcgctgaatgcagttgaacatatgcccattctcaggatctgtgctgtacatgacagggtactctaccttgtacttcttgcgggctttgcccacgttgatggctaagtggagcaccatcacaaagctggcggcaccagtgagaagcacgaatccatattccttagagaggacagccatcttggctctggctcaccttgacg

SEQ ID NO: 213 - DNA, 556 bp, Rattus norvegicus
gaacctgttcgactgaaaacaatttaaagagggctgtggctatcagcttcagagtgagtgagttcagctcctcattagagagttcttgaatttcccataaaaatcaacagtgtgcatctaacagcattcttttaatttgcccatcaatatgtgaatcaccacatcaaatattcttcagggcccctttggcttgcagattaaccatgtcatttttgccacactttttgaattctcattttaaataatcataaatagcaaaactttgatattctttggcatagcatagctgtctgattcagccgagtctctatgtcttagaaattgcacttgttccttctttagagtcccagtagtctcctaaggttttagctgaaagattctttattgtattcaaattttgtcccatatgagttgttccggttactcaaattatgaagagtcttggaaatagaactgggtccacagcagaaaactccaactgttttccctctgttacattttgctatttcatcaaataaaagcttccaccgaggacgcccaataaaaagtctagaat

SEQ ID NO: 214 - DNA, 529 bp, Rattus norvegicus
  misc_feature (1)..(520): n = a or c or g or t
caaacattcaagaacagttcatttctatgtgatgtaaactcttccataaagtaagacaagaggcaacagtcccccgctcagaggtacgcagaccaaaaggaccattcaggaccatcttagaaacctctttagaaatcttactaaaaacaaaggcactcatatacaagaatgttcatagcagcattgtgtataagaacagaaacctgcaaacagcccaaatgttattcagcaggtgagtggctacctaagttgttttgtctgcttggtggagtattatacagatggaaatgaacaagttatagcaatcacaacgtacaggagtcttacaaacaatggttaagtgcaaaaaagcaaacctcaaggaacagagtacaacatttttgtaaagctaaaagtacaagcaatacannataatacattcctaaaggatatatacacacatgggcaatattattataacaagtgattaatgagcataaaattaaagacagtggctacctctaggaagaggctgggcaaggggacaaaa

SEQ ID NO: 215 - DNA, 605 bp, Rattus norvegicus
acacttacgctttattggagtgtaaaatctataccatgtgctccttcacaacgaaggccccttgaagaaccacaccagacacatgtaaagacatgaaacaacgcttagtaggctccggtcccacatgagatgtcatcatgatgtcgggactaagagtataatggggcctggtcagtggctcagtttctgattttgttgagaaatgtaggtttggaggttgtgaaagatgaggatgaactcatgtgcctgagccctggggaggtctgactcacctttgggctctactggcaaatatggcgtccttccccacaaagagggcagagagtttgactaggtgtaggactaagcagacaggaagtttgtgtaagaaatatcagggtgaatgggggcgagggactgtgggatgtgatggctggagggatcttgtgggagatctcttcaaatagtaaatgtatgactattaggaaaaaaagtattgcaaagatataactgttttgctggtggtaatgagtacataccccagtgtttcaacccaacactctgtgtgtggctctatccttctgtccttccttaattagcccaggtcatggtgaaacttttttttt

SEQ ID NO: 216 - DNA, 593 bp, Rattus norvegicus
aataaagcagaaatgtgtttattaggcacccttgctcctcacagaggagtgggatccagcccaaggcattctctctgagctccatggaggcttgtaggtgtcactggagagtgtaggcatagaaccagccaccatcccaagcagaacactatttggatagagttagatcaccagaggtagccctggcatgaaacagggcaagcgcctggactccacaaatactgagtgagaggggccctcctggacacacacccaaacattggcagatcaggggatctgaccctgaggcataagctaccctgagccagtaaggagggaagggagccacagagcatagggtccctagtggtccctcacccgaaccaggtcccaaggaccctctctaaattggcccgcatcctcctggccacagctgctgccttagtcccacacatagggatttctaaagacctgagagatcttgccgtctttcgttggcgtggccacctggtggctctggaccatgtacatgtcttcagctcgcagggttgagttggcactgcccatcacctggctgttggcggtggcccgtgggaggatgacgtcgtacgcac

SEQ ID NO: 217 - DNA, 454 bp, Rattus norvegicus
gaaaggacagcctggctttaatcaagtctcagaaagcctggtttcagcagatgcgccaaccaggtgtcaaacagtccagccttctgccttctgcagcagggctaggttacttggtccagctgactttggggatgtcatagtgctcggtgagtgtgtccaggtgtcggttgaagtcctccactctctgtttgtgggtttttgatgccttcttcaggattctttccatttgccgcttctcctgcatcttttcgaaggccgcctgcgccggcgtgcgcttgtccaggcagcgcctcttctcctcctcgttcttcttgctcgtccccatggcctccagcatcttggccttgtctttgtccttcttcttcttcttccgcttcgtcacgccgagctccgccacgcctttcagcttcagggggcccttctggacctgctcgtatgcctccatatccctcac

SEQ ID NO: 218 - DNA, 636 bp, Rattus norvegicus
caaaccaggctggattttatttacttatcacaacgctcctaagctgaggcgtttatctcatctgttgtgcttaggagataagatattgttataagtcctcattccataattaattaatttatatgcaaatatctagcttaccggtttctctatttttatctagtctatcagcctcttctcccctcccctcacacatactcctaattatctcaccttcaagaggagacacaagcatgcgcagtaatgagattaattgtaatcaattaggcttcttaatcgcttccctaatacaaactctgctacggaagccgaattttcatattagaaaactgtggaactttcaaatgattctatgccaagtttaactggctctgctttctgttcccgctgcaaattacagaactaacattttgttaagaaatcgtgcttgcagctcagggccttcaggtaagggtcagagaggagggctacatctgggattccatggagatcctgtttaaagtcaggagggctttctgataggggacctccttacactcatcttgtggggacaggctggtctcctctgggttctcacagctgctcaccatggcaactgcgctgaaggatctcctcctggtgttggtgtccgaggtg

SEQ ID NO: 219 - DNA, 499 bp, Rattus norvegicus
cccacttaaaacggaaacacctttattgacagtataggacagttaaaacgcacgcaaggacaaagatgagaccacagaggtgtaaagttgcagcacaggagttaatattcttcaccctcatcgtctccttcagcactatctgccccaacctcctcataatccttctctagggcagccatatcctcacgggcctcagagaactccccctcctccatgccctcacccacataccagtgcacaaaggcacgcttggcatacatcagatcaaacttgtgatccaggcgagcccaggcctcagcaatggctgtggtgttgctcagcatacacacagctctctgcaccctggccaggtcgccaccaggtaccacagtgggaggctggtaattaatgccaaccttgaagccagtggggcaccagtccacaaactggatggtacgcttggtcttgatggtggcaatggcagcattgacatccttggggaccacatcaccacggtaca

SEQ ID NO: 220 - DNA, 606 bp, Rattus norvegicus
gcacctgtttctgtgaaagacaatttattcatttgttctcagctgtcagccacattctgtgttcctagaatcacagtcctttaatcccactagaatcctgatttcacattggcaaacgcccagtgttttctctgattgggtttcataagcaccagtaataaagagtaataaaattaataaaaagtgttcatcttaaagtcctttgaatggacagtgcaaatcattaattcatcaaaccctggtgtgtgggagacaatgaaaaggtttttacgaagatactgatctagattttggtgattctgaagtgacgtcttggctatctttatcctggaaggagcaggatgccagagcagttctgccagctacacctcggttgttggtctttctcaagatttcctaccatctttctgaagcctggttctggtaggttctgtgagtaccaatggttcctgtataatggttgctgggtaatttttacccagtagttcaacctccacttgttgtcccacttcactgagctcaactgggacataagcaaaagcaggctcttctggatgctgtaactgtagcttccacatgttgtgttgccaatcagcttgcccttgt

SEQ ID NO: 221 - DNA, 662 bp, Rattus norvegicus
gatgagaccccaccagctgcacaaagtactcctggcatcaggcaccttcctccttggcaatgcgatctttcttgagcggtcccatgaatgctttcttttcctccatggtctggaagcgaccatgtccgaatttggaggtggtgtcaatgaacttcaggtcaatcttctcaagagcccgacgcttggtctggaccagcaaggacttccggagagtaagcactcgcttcttggttcccaccacacagcctttgagcatgatgaagtcattggtcacctcaccataatggacaaagccacccagtgggttgatgctcttgtcagacaggtcgtagtcagtagatgcattgttcttgatcagcttaccatccttgatgaggtagccttgaccaatcttgtaaatcttcttgttgatctctgttcggtgatggtagcctttctgcccagctcgagccacagagaaggctacacgggcaggatgccaagctccaatacaagcaactttgcgcagacctctgtgggtctttcggggcagcttctttgtatgccaacgactggtcacccctttgtagcctttgccctttgtcacgccgatgacgtcaatcatctcatcttggccaaacacctggttcacagggacctgctgctccagcctctctcgggcc

SEQ ID NO: 222 - DNA, 719 bp, Rattus norvegicus
  misc_feature (1)..(719): n = a or c or g or t
atacatttaataggataatatcacataaaataataagataggcacaaactaagaaggaaagagtcaggataaagtgtcattgccatttttgtttgcaggatagagtcagaaaatggaacaaactgagatgactagggaaacattctaaacccaccccaacctagctaaagttacataatgttaggactcaagtgccaaattagatattacccacttaatctacgagtgaaaaagagactccaaaatttatcctatttagtataacaacttttacatgaaatatatagcaatttgtatctcagaaagcaatacggcaactcttaggcgtttcctttatgcagtgactagaaaatcttggtacagctaggcagctctgcgacaccagtaagctgctcagggctagcatagaacagcttgatagagagctaacctctcaggtttcagaaggcagcaataattctattttggcttttattctaaatgcttactgtagttaaggcgacaactgaagcacattaagtgaaggtagttagaatttagtgacaatcattagtctcttgccacctacacagaactgtataatgcttttgtggaatggaagtgttgattaactggaattttacacactcacacacaaacttaanaagtaacgatcaaaggcaatcatcctacaggtactatgctgatgtactacaatccacatatgccacagaactgaa

SEQ ID NO: 223 - DNA, 589 bp, Rattus norvegicus
gcgaagccacggcccaactttatttacactcattgcaaagcatgactgagggtaaaggacaggtaccaggggatggggggctgggggtcatggagactgtgcgggtgcacggtagggttgcaggagaaaaggaaggcggtggtgaggatggacagcccctctttcagtgtcccccaggctcccaggcgtccgggggcacagagcaggtgaggctgccttcaggatttggacttggacacagccagtccaatgagtccagccaggcccgccacacccagggccatgccaccaacaatggccatgcctaccagtccatctttcttcatggccttgtcaatcaggcgttccagctccttggcctggctgttctggggctcagtctgtaacagtccccgcacatacttcagagccttttcatattccttgagccggtagttgcccacggccaggtacaagacataatcccgctgctcctctttgctacctttgggcagcagctcctccagcatcacgatgcctctacggatgtcgtcattgtatttgcttcgaaccaggcaccaggcgtattcaaactgcgtgctcttggaca

SEQ ID NO: 224 - DNA, 650 bp, Rattus norvegicus
gcagcaacaagcttttgttgttaatcacactgacatgacagggttcactggttcctgtagcagagtgcagggaagtgtgcttgctccacaggaactcaaggtcacagcctcccttcctaggcagaagggaaggagtaatttagttgaacaaaacgaatacccactaacctccagagcatactcgggaagtattggcctgtcttctggaaacccatgcccaggtagagggtcacagcacctatctgcatggtgctagtctcaaggacaacatcagtgtagccctggtcccgtgcaaactggagcacagttctgaccagtgctttcgctatcccctgtcctcgatgctgtgaggacacagccaggtggaagagctgcaactgcttcctccctgatggaggctccttgactggcagagcacccactgtgcccactacctgctccccagactcagccacccagaaacctgagccacgatcactcagataagacttggtgatgtcagccatatctgtgtgtaaacatttggacacataattcttccagggctgtccagcaaggaaccacaaaaatgggagcagaaaaaagatgcatacaacagccagcagccaggagccagacaccaggaccagggcaagggacaccccaagtaa

SEQ ID NO: 225 - DNA, 591 bp, Rattus norvegicus
  misc_feature (1)..(591): n = a or c or g or t
gcggctgtgcctcttctctaaccaacccccggtaagtatgtttgttaaaatgcccttctccatccttcccttccgagctgctttgctcagtagtggctgtatgcatggaagactgaccttccatgtaaagcccgttcttctcttggatggatgttctggaacacggggaactggaggtgttcggagactactgggtgacgtgctcatactcgcacttcaacagctgattctgcttttctcctgtgtttatgattcgcatatgtggtgttttcaaaagttcaatcaaatgtgatctaatttccagggctgactgaagcctttcaggtctccaaccaaaatatttaggacaactggagcctggctggtaggtgacggtatctagtaggtgtaggaggctttgaagagtgactgcgtacaatcagcgcctgacgagcccgtgtgaacatactgtccttgggctgcctggcagttggccacagcccgcttcatgaaagcttcctgngttgccttcttgtttgcagccttgccgccccaagcagccaatgcactggcctggagggctctgccgtatgaaaagcttagcctcgtgcc

SEQ ID NO: 226 - DNA, 464 bp, Rattus norvegicus
gatgtatatgagtacactgtcgctgtcttcagacacaccagaagaaggcatcagatctcattcagatagttgtgagccaccatgtggttgctgggatttgaactcaggacctttggaagagcagtcagtgctcttaaccactaagccatctcaccagccccaggagcatacgtttaaaactatttctgttctgtgtctcacttcatggaaatgaagaaggtgctggcagttacattgatctctcagagctgtcttacaggatctctggaagtcgtggattttattttagaaatacttttctttcctagaatcatgggctgagagataacttcaatgagggcagtgtaaggggtctcaggagacctggtgcctcatgactgcgtgctccctgtcagctggagaagacctggctgcagaatatttcaggagagttgcttagagacctcagctatgggttatataaa

SEQ ID NO: 227 - DNA, 482 bp, Rattus norvegicus
  misc_feature (1)..(482): n = a or c or g or t
ccattaaaaaaccaaaaacatcactttattatgaatccaagaacactgtataaaaaacctccagtcgtagaaatgaacagacagcacgtttatatacagacactgtacatgtgggccctgccctttaagctaaactccacagactatacacatgggcactgcccttacagctatactccaaaaccaggctgctatagtcctcctgctggcacagcttcagggaatgctgccccagggaaggggaggatgcagtcagtgccgggctacaaaactctctggcagcccagcaggtggaaatcttgcagagatgctgggtcagcccaagctgtctctcttgtacctggcttccccgcaggaagctgtctcaagcttttcctttggtcagttcatctgcaaattatggcttccttggggaaggacatttttnacaagttcagtgtccaactgcatggnctcaggctctttcagcgcatctcccagtg

SEQ ID NO: 228 - DNA, 395 bp, Rattus norvegicus
tgcctgacattagactctcccgacatgcaagtgttgggagctcaaaggattcttgagctgggaaatcctcaagggagatgacgtatagggagccaggcgtccaaggcgtacgaacaaggtttaatgctgcacccgtcaaggcaggagctccccagatcgatgcagacttcttcctccgtgtcctccacaggactaagctgtttctgaggcctcagcgcatgctaccatcgaggcctgtggtgggggagggggctgcctaatcgtccttcttaaacttgccattgatgtacggcacccagtccaggatcagccgccagtccgtgacccacaccagtcccacggcacccacagtgccccacatgccggatgtggggatccagtttttgggcagttct

SEQ ID NO: 229 - DNA, 474 bp, Rattus norvegicus
gggctcctcaagatccaaaccagttgaaccagtttctaggacagcagcctagaggtggttactcattcctgggatcccctccccccaggtccaaagctcccttttgttctcatcccgtgaaggtgaaacctggcctgggcccagaggggcagccaggtgtaagcagacttggcccagaggtcctgctgacctctcattcctctttcctcccacagtggactctgtctgcctcaagtgggcacccccgaagcacaaacaagtcaagctctccaagaagtgaatggcctgtgcccttctttggatctgtgtttcctggcctctaacctgtaaatatgtgtacagacctgttttgtgtcatttattaataaagcaaattctgctggtgtgctggacttcggaggcaggaagaagtgctgaagggtgatattcttcatttcatttcacatccagccagttgtgttaaaaacatttcct

SEQ ID NO: 230 - DNA, 568 bp, Rattus norvegicus
gacagaagttacttggattttattttatcttaatactgaaagtaaaattagcataaactacagtccaccataagctatctctctctatatatatatcaagctatagatgcatcatatttggggttgtccaaaatagtttttcctaaaagtgtgattaatcataaaaatttttaaatgaattaaaggtattaaaatataatatttgattaatactaaaaatgagaaaaatactcaattactaattttttaaccaagaataagcacttgctagtcaacctaaagagaagatcacatttatgtggaaaagaaaccagtctgtctgcggagaaacaccaccacgtggctggaacctacaggagctggccctcgccaccatacccaggagtctgggtaacaacaggcaggacacccagttcacaagagcaacacagaacaaaaagagcacccggaagtgaggtgaacagggccagctatgcctggactgagagctgaggcatctgacaagaccaggagtcacagactcactgacgtggtcagcgaccaggaggtaaacaggaagcagggtggt

SEQ ID NO: 231 - DNA, 583 bp, Rattus norvegicus
accagaaaataaagccgttttattattttcgtcttatccaccatatggcctgagggttggggtgggagcagagtaaatggctggccccagatgaaggctctggagtcttctacttggcctgaacagtctcctccagcctgtccaggcgctcttgaagcttttgcactatggcgttgagattcctcacatcctcctccagccgtgacacggtgtccgagctaagagtgctactgggctccggtgtagctcttctgcgagcactgtccaggcccctgttgactcttagctccctgctctttgggggcacgtagccatccttgagggaaatgaggagggggccagcatcacgaccgctcagccactcctcagctgtgagggcggggtcgggtccggcagtgggtggatacaggtcctcctggaacaggtccgactttctaggcactgtcatggcaataggctcacatttccgctcatgaagcttatagaatctggcaatctcgcacttattcacttccaggccacgtttgggcatgtagcccataccacgttgagactccttggaactgaacatggaaagataatg

SEQ ID NO: 232 - DNA, 593 bp, Rattus norvegicus
ccgggctcattaggaaacctttattgtcaccattagagataaaaacatcggagtcccacacgccacaccacacaaggaggctaactgaagggttactgattgtcacagcagcccagacaaagggctgaacctcggtccttagccaccccctcccctgcacgatcagtggcagagggcaatggtctccatgttgaggaagcggatgtgcatcttggtctcgatgtcgatgccctgccagatcttcaggaagtcctcaaaggtgatcccctcgtacacctggtccggttccatctgtcccacgcacacgctggcagcctccatcatggctccgtcggcgatggaccgagctgactccttctcgatgtgaggatttccagagagcagttcctccaccacatttcgatactcttccagggtgatgcggccgtcactgtccgagtcatacatatggaacagaaatttcagcttctccttccgagacagctccacttgttcctcacccagggtagtgtcaatgggccggaagtaggacatgatagtcaggaagtcctcgaagttgatctcatcggccaggccgctggaccccttacgca

SEQ ID NO: 233 - DNA, 560 bp, Rattus norvegicus
aaatgaaacaaggtttatgccacacagtccaacaatgtataaagagcttgaagtagaaaagcttgtggaaaatgtatactctttacatggtacatacagttttatagctcataaataaacacagagaacaggagccattgttcacattaccgaccagcaacacagagcagcagtaacaacacaaacacaatttccttcgactcagccacaaaaacttgaaatggtctcaccatacttgaggaaaatgacaggtggtgaagtgttacagccacacccacatcaccaagtgctttaagttgtctctgggttagaaatatcaacaaccgtattaactccagagagaagaaggcagggtaagaccctgtcctataaggcacttaataaattgacactacccttgtcttaaaatactgcaaatttgccttgaaatatgctgatgttttacggcgaaatttaggtttcttttatccaggtttagacatagacataatttgaataaattgataatactgtctgatggccactctttacaccagcttcaaaatggacccatttaaact

SEQ ID NO: 234 - DNA, 572 bp, Rattus norvegicus
aatggaaaaagccattaatattcaaacaaaggaatcacattttaaaaaccctatacatacgaaacagcttccaagaacattcaagcagcagtcaggagggaaaaatgtttcaatagcccaattttcttcaaaatatgccagagaatacaatccaattcactgctacaattcatagaattcttcagtgttttcttgagacgctgaggttcactgttggcagtttccagtggccggcgagtactgctcggaaaggccagcgcagacagctgaccggaagaacttcctgctggaaaactgctcattcccaaggaaagacatttgaaggccgggctgtggccctcacaactcgtccttctctaggtcatcgagctccacatcactgaggtcaatgtcgtcctccacaggaagctcgccatccttgccatcccagggctccctgggagtgatgttagggaaggaaccaccccctacgggtgctgtggagccacgcccgaaagacagttccctgagaaactcattgatgccttgttcactgaaagagcctttgagaagagcaaacttcatcttgcggg

SEQ ID NO: 235 - DNA, 613 bp, Rattus norvegicus
aaaggacgtttaatgtttgctggcttacagtttcagtccattatcatcaaggtggggaacatggcagcatccagacatggtactggagaaggagctgagagttctaaatcttttttgaaggcagacaagaggggactctctcccaaggcagccaggaggagggactctcctcacaggtcagagcttgagcataggacctcaaagcccatctccacagtgactcacttcctctaacaagccatacctcctaatagtgccacttcccatgggcaaaccaccacagcatctctccatgtggttctcacttcatgcttccagctccttccagctctcttctgccgccttcttcccttctgcctccttccaagtccccttggatctgcccaagtctcctgcatctctgaagttatgctccatacttcctgccccagctccagcggtcagctctttatcaatcaaaaagccacattccagcttgaaccaatcagtagcaggacagcgcccaatcaatctcttagggttgccctttggcactgaggactgcttgaccttcaccatggcagcttgccttttaatatgatagtctcagaaaatctttctggggtggtgggaa

SEQ ID NO: 236 - DNA, 605 bp, Rattus norvegicus
aagaagaagaggttcttaagtttattgcttgactgggccaggtcgttgggttttgtggtcaccgggctttgtctcccttctgggacaatggtttcttccagaggaccaataggacaagcaagttcaccatgagttgcacatggcccaagatggagacaccatagctccggtacagcaggccacccagggtgggtcctacagtacgggtcaatggatgcacagatgcacagaggcccaacatggtccctgtgtctgaagcagatacagccttggtcagcatgctgtctgtgactatgttgagagcacagagactgaatacgagtccaggcaacaaaaggcagaagtggaacacattggacatcagtgccatgcccaggcccacaacagcaaagactagtacactggatctcagcagggcttcctctggaaaacgggtgcttagtctcccaataaccaggccttggatcatcatctggaggatcccaaagaaggacatgaggtagccagcctgtgcagcctccagctggaagaagtccatggagatgatggagaacatcaccatgaagagtcctgaagggaagccagagattaccttgaccaggaat

SEQ ID NO: 237 - DNA, 644 bp, Rattus norvegicus
gagatatattaaaagactttattcacaatagagaaattttacaaatataatttttaaaaattatgtgtcaatctattatgttttccgtaacatcagagatttatataaagttggaaacaacagaatgcacttatgaacaaatcaaaaacaatgtagaagtggatggatacacacgacagagaagtcactgagttctctaaatgagcacacaacttataggtataatattaactgcacaaagtataccaaaacatgttttgtaaacacaaaatcgggtgctaccttaactgctcacctttaagggcgtggatcatacatgtaagtcaaattgcacagctttgttggaaatgaatgactcgtcatctatttggagacttccgttgcttaaaattgacacaagataaaagcctaatcaattacgctactataaaatttgtctcttatcgcgtttaaatttttggtgttctgtgatctggcattaaaaaacagtccaagttttaaaacagaaaacattgctcgccagttggagagtagctcgtggttcggcttcctccctgctcgaaccggaacaaacgctacagtaccgtggagcaggcgcacaggacctgacgttcgcgtcccaaccgctacagaaatactcacca

SEQ ID NO: 238 - DNA, 465 bp, Rattus norvegicus
aagatttacttgtttattttttatatgtatattcatacactgttgctgtcttcagacaacccaatagagggcatcagatcccattacagatggttgggagccatcttgtggttgctgggaattgaactcaggacctctggaagagtagtcagtctcttaaccgctgagccatgtcttcagccttttacgggaaaggtaaatggctcctttgttaaatctgggcagtcgaccacagagacctggacatgagcaaagttgtcctttagccccttctgcaaaacttctgcgagctcctccagacttggcacgtggaaagaaaactcagtgcaagccattctctctcctctcagcaactcagacacagcagctgttggctgacctccaccagagttcacagggcaccagcgtgaacagtccctgctcttgtcacccactgaataaggtgtttgtaatcttccgttagaa

SEQ ID NO: 239 - DNA, 443 bp, Rattus norvegicus
acactttaaaaaagatttaatgataaatacatattggtagaaatggttaaattcttgaatgaagaaacatctgaggactttctgcatcatggctcccagcccttccctccaggctgatggggcaactggaggcccaccaaaccagcagactcctccactgagcgctcacccttgccatgaaattcctgatgaagggctacatgttgccggatactacgcaagaggcagagataggtggcagcttggaagtgaagctcgtgttgggctctgcacaacttctcactggtgacccgatgtgctcggaaagccttaaccaggtaccggtaggctgctgtgtcgcggtatggtcgcccggtggccgcgttcaggtagcgcagctcccgcagaaggcctcgcagagtgcgcgccggcgaaccccaagccgccattttcctgtccttggc

SEQ ID NO: 240 - DNA, 424 bp, Rattus norvegicus
gaatgctaaggaaagttttaattgtgcatatgtattacataatatttcgggtacaaatggcaggccatcaacgtcgccatcgaaacatgtgggatgggaatatttttcttaaagtttggaaaagatgctacaaggggtccataaatctgccttcttatgcatctacgtgggaattcacatgtgctatgatgtgggcttgttttatcagtcttctgtattcatctaacaagtcggccttgaactccctatgtagacaaggatggtcttgaactcctcattctactgccttcacccccgagtgctagaattacagacaccatgtccagccactcatgcaaacaaaaatatgtagattggataatttccttccccttcagtcaatgctgctggagttgtgggggggccgggggaagaacacccgatg

SEQ ID NO: 241 - DNA, 512 bp, Rattus norvegicus
  misc_feature (1)..(512): n = a or c or g or t
attagccaaagcacatactttattagctcctgaactctagttctccttctcctgtacagttttggttccacgtagccgtccagtccggcgagcagcaatgagacccactttgcgcccagctggggcatctcttcggatagtggaaggcttgccaatgtgctggtggttaccaccgccaaagggatgctccacaggattcatggcaacaccccgcacacgtggccagcagttcctctttgccttgtacttatggtaggcacggccagcctttaagataggcttgtcaattctgcccccgccagccacgacaccaacaacagctcggttagcagaggaaatgaccttcttggaccctgaaggcagcttcactcgggtcttcttggtctctgggttgtgggagatgactgtagcatagttcccggaggctcgtgccagcttgcccctgtcnccaggcttctcctccagacaacacacgatagtaccctcaggcatggtgcccacgggcaaaacat

SEQ ID NO: 242 - DNA, 658 bp, Rattus norvegicus
acaaacactttttattttgtttttaatttagaacatgatacatattcacaagatttacactttatatcataccaaagcaatctagaaacactgtacagagcacacttgaacatttagaaggctatatataatctgtggtaaagtcataggcatcgtcttcttcactcattttatccaagataaaggatctgtcagatggtttacttgctgttgattgcccaggtgacatctccctggtctcttctacaggagtcacatctgagatctctgcatttttttcaccagtaacatgttcttgatcatcaccatcctgttggtcttctgtctgttttggtgactcttcggggatgtccttttcttctagtattccatttgtcaggcccgaagaccggaaaaggattttattagttaaatgagggcccttgaggacttgtatgctgtgtgcattattcttttctagttcttctagattaaagcccctcttcatgattgctgtaatattctcattaaaatgaggagaatgattccaggatgcagggggatggcagtagtaacctaatgaggcacctgtccactcagaccatagcagcttagcagcactttcgacatttgggcttccacctttttggtgcagacctcttctctgagcaagtttagt

SEQ ID NO: 243 - DNA, 511 bp, Rattus norvegicus
gagcgcatattggatcagcagtatcagaaatcatgaatcctgtggtcacaaggccatggtcttctctgtgtatgcccgtccttgtcccctgagggatcccactatccagacccagggggtgctgactcagtcttacagtgtcacttccagctcaggccccctccagcccagctctgggaaaatactctgactcacttgtgccttaacagaaagtgtccatccttcggatgtccaccctctggaggaagtgatggttccacctctggtgtcagccgagttccgagctgcccactgtccccacagtgtgctgttcgcagagtatcagaggcttttactgggaataaggacagcaactgtctgctttcaggcttcggcctctggtggaaggggactgggggtgggggtggggtctccatctgcaggatgttacaatgtcacaatgttacagcacacttctggcctgagatactttgccctgggtttctcacaggtctccacgtctttcagattt

SEQ ID NO: 244 - DNA, 487 bp, Rattus norvegicus
aaggtttgtttttaaccgttgtggatgtgtacgtgtggaggtgtccccggaggctagaagagggtgcttgctcccctcgagcctggcatgggtggactctggtcctctgctcttcactgctcagccatctctgcagctccggagaagaaggctctgacaggacagggcccaaaaccctgcttgtccttcagtggccctaggaatgcttaggcagactgaggtaggggcacagaaggggaacctgaattctcatagctcaagacctggttaaaacttctgcgggggtagtctgaggtaaaagagaaggcaggaaaacagttctgtcaaggaaaggaaggcttgaagaaaacagacacaatggagccaggacggagaggtggagcctatgaagtcaggagagtccagaggaccacttctctaccaggagcagaccttagtgatgacagagaacagagctggtcgttagacacagcctacagccagctct

SEQ ID NO: 245 - DNA, 606 bp, Rattus norvegicus
aatgaccagcaaacaatttattggttaaattatcaatcgtggagttccttgataacattatataacaaatggattaattcaccagaaactggcttgaagatactgattttaattactttaacaaaatttggtttgtgtagcaagctcctactgtcactgctagacagtgaatgcagcggctatccaaagccagtcattccttgaccacgggggtctctcagagcacaggtgaataccagttacggttgtgtttgctgacctagcacctagttccagccttaggactcagaagcagctggacagaagatatggggggaggggagatgctggaaacgaacagctaactcgacttcgggccggtgttagatctgaggcaactcgcaggctctgagaccaaagaggaacacagctttggatgtggctgtgaagaaggcaggccccgggaccgaattggtgggtccagaatacagtgccaggtgggcatcaggaactacggggcttcttcttggcttccaggtcctttttaatctcctcaagttttttagccaggtttggcatgtcgtaattctggggccaaatacattccaaccacgttgcccaaagtaa

SEQ ID NO: 246 - DNA, 562 bp, Rattus norvegicus
cttgcggtagccaaactttttttttatttttttttttttttttttttttttggagaccatcccatgtcctttattgggccagcaatgctggaagctttgcaaagagtgaggtccccgctgggatgtctgtggcatcttggtcttgactcccataatgctggggggcaaggtggcatccattacttggtgtgttctttgacatactcccagccctccctggagtattctcgagccttggagggggccacggacaaggctgccatgaccgagatgatgcctgagttccaggaatcacggaagttcggaaagttaatctttggaggggctgggagctgtgacatctccagacccgtctgctggcacacatattggctgaactggtacattgctggtggcacaacttcctcggccttccgcaggacagcctcgctcttgtcactaggccccagcagctcctggtcataaacaaggtagactgctcctccagccacacttcccttgatgaggaacctcattagcgaccacactcgagccaccatggtcggtctctcacttcactcgc

SEQ ID NO: 247 - DNA, 694 bp, Rattus norvegicus
cttgcggtagccaaactttttttttattttttttttttttttcacacttataactttattttacagtatctgcaagcatgcatgtcagaggcaaagacaacagcatttagtggatatttatgtttattaaaagaaaccgatggcaccgaaggtcaagctgccttctgatttcatggactaaataataaagtattacataacttcagctttacagggaaccacgctaatgacaaagtgtatgaggaaccgtgtaatatataaggagtctaaaatatttatttttacatatctacaacatgtattttcatatttctagaccaaccacaaatcgtattgggaaatatttaggtacatgaaaaagcttcaaaatataaaaaaaattaacatttggaaaaaaaatcacatgcgcgagctcattaaataacaacatcgacaaataaataaccggctttacctattagctgctgccttgcattgctggcattccactccaagagaggtcaacacgagggggataatttcacactgagactggaaaatgccaccgggcttatttttgaagtgaaatgtcacaaggtttgcctctctttcaaaggaagctaacccctggctgtcaaactattcccataaaaactactggaaaagcccctttgtgaaatgttctgtgaagatacattttttttttgattgaact

SEQ ID NO: 248 - DNA, 409 bp, Rattus norvegicus
ccgtgtcagaaactgtttaatgttagaattacaggcttttggcaagtatatggcaagcccatctgtccgttcccatgtccactgagaacacagcagagggggcatgccccaagctctggcctcagtccagacttcagcttgggtttgtccagcgagatgtctccagtccatgaaagcccatctggctacagcttgagttcactgggcattggctcccctcttaggccagctgagcaataggcacaaactctgcctgaaactctgctgcttcctgaggcctgggctggcgccccgtgtagagaaatctctggacaccaaatggtttcagtcgtcgagcaatggcctgggcgagcgcagccctgccctgggccggcaaagggccagtgacgaacaccttcatcctcgtgcc

SEQ ID NO: 249 - DNA, 570 bp, Rattus norvegicus
ctggaacacaagtggctttattctggagcctgtccccaaagctagctggagtgctaaaatgagaagggagtcctacagacaaactgagcaaactgcagggatagctaggcctccacagcccgtccattaatgatgcggatgtgacgaatgatgtcctggatggcttgggatgtggtgccctggcctccaatgtctggggtatgcatattttcattgtccatggatgctaagacagcttttcggatggaggtggcataggaatggagcttgaggtggtctagcatcatgcaacttgctagcaatgtggcagtagggttagcaatgttcttattggcaatacttttgcctgtgttccttgtacctgtctcgaatactgcatacacatggccatagttggccccagccacaaggcctgggcctccaactagccctgcacagacgttgttgacaatgttaccatagagattaggcatcaccatgacatcaaactgctgaggccgggataccagctgcattgttgtgttgtccacaatcatgctatcaaaggtgatctgagggtagcgggctgcc

SEQ ID NO: 250 - DNA, 583 bp, Rattus norvegicus
gagtacactgtagctgtcttcagacacaccagaagagggcatcagatctcattacagatggttgtgagtcaccatgtggttgctgggatttgaactcaggacctctagaactgctaagccatctctccagccccatgttctagttcttatcagtatggtttgcacttagcctatgacccattttgcattgtgcctgatgcaaggggaccttaatcgccccccagtgagccaagtggctccagttccttttactatgaagacactcttttctcaaccttgatgccaccgagatccctgcgtctcttgtctctctcaccacaggtcatccagtatcaatgccatctacccaccaacctgctggctcctttctgatgtcaaattttcccatcctgggctcattggaccttacctttgggttggaaaaatagaacacaggtcatttccccagaaagaatgctttagaagacattttatttcattgtgtgaactcgcgtgctgcagcacacgtggtcagaggacagctgcgtaaacctgtcctccttcaccatatggattgaagttaggcttaagcaaagaccttgac

SEQ ID NO: 251 - DNA, 543 bp, Rattus norvegicus
gcatctccagtcatgctttattctgcagagggaaattctgtggcctgcccttcacctctcctttctcattagaacagaagtgtgttagtccaggccctccagaccctgctcccatccagagagtataatgtactcaagagggagtagctgtgtgtgcatgcagatatgtgtgtatatgtataggtatatacatatgtatatatatacatatacacatatatattttggctgtacagtatttataggtatggggaaaacaggattaacattacaatgatagctgcaacccatcgaatccagttaaatcagccaaagacaaagaaagcaccacttggcctctgaatggctgtttggtttctatctgaacaaacataaccagtagatggaatagatcaggctggtatcaagcccagaatggctaaaggaggcccttccttgtgtttttccagggtgtctactctaggaatggactgttcttttgggttctctctctctctctctctctccctctctctctctctctctctctctctctctctctgt

SEQ ID NO: 252 - DNA, 503 bp, Rattus norvegicus
aggtcggacgcctgctttattcagacgggaaaagagcagggagtggatggagaccagcagaaaagaccacactaggtcagcactgggcaaggagtggccagggtgtgactctaagagttggcagaaaagccctggcgtcttgagtcacgacagtctatctgaagtagttgggacactcgtgggcgaccacgttccaggcttggttaaaggcctccacgacagcgggctccaggggaccttcctcagtggccgccaagttctgctccagctgctccaggctggacatgcccaagatgactgcgtcccctcgggtgccctggagctgtgagtgatggtacatccagcgcagggcagccgaggtcatgctgggggcactggtgccataggtggtcttcagggccttttctaccagggcaatggcctcaaagtggtgttccttccagaagcggttcctgtaggtctcagaccagctattcccaaagaagcggccctcgggctgtttc

SEQ ID NO: 253 - DNA, 634 bp, Rattus norvegicus
tttttaagccaaaaattaattttattgaatcaaggcattcattcagcacttaacacagattgcaagaatacctcagcatgtaggggtacagggagagagggaacggtttacatttatgatgtaaaataaaaaaacctaatcgctacagatagtttgtaaaatttgtaaaactcctcgaacaaggtctagccaactttactgtttagtgattttccccctttcttaaaggacgagaagctagatgatgtgtgtattactggttataactaataaatcagcttggaaaatcctaagacagaagcataaatacaatataaaaaggcgagatttttaaaatcgtattataagaatattaacaataagtggaaaagatacattagaaccagagcggtgttacactagttcaaaacagaactcaaaggcaaaacaaagctgatgcacatggagggaaacggcctgatttcaggaagtgtgtccagacagacacccacagagaagtgctgtcagtgactgcgtggtcccctgtgttgctcagccctgcatccctggcagagtgcctggctcaggaagttaggctttctctaaggacttgtagtactccaccagcacagtccacgccttgggggccatgaag

SEQ ID NO: 254 - DNA, 600 bp, Rattus norvegicus
ggacagcagcagcacccaaggcttctttattggtgttttagaaagaaagggtggacttcagggtgaagcagtactcttaaggctcaataccaatagattttcttgaatcttcgagtctcctggatccccatggcctccatcacatcttcttctaatgtctttagccggggcacgtaagttctttctaaagcatcttccactgatgtgtccttggggccatcagtccatgtttcagggacaatgccatctgctctaggaaattcaggtttggggataattctcccagatcttgtagagacacgaacacgctctcctgcctcagtaaatctccactggatctcagtaggtttcctgtccacaggatccactagcttgacttggtgatgaagcaagggggcttcgctagggatcatggtccctcggtgatccttggttctgccaatgtagcggtaatgcgtgttcaatccctccaggacaacccagttccgctgccgaacaacttggactactttgccctgcttcccagcatccttgccttctaagatttccaccatgtctccaaaagaataggtgccagtcttcatcagagatggggtctac

SEQ ID NO: 255 - DNA, 436 bp, Rattus norvegicus
ccatataataatttaatatatgccagccaaacaaagtagtttatctttattcaattaaataaaaacagacctgtcaggtatattatataacattcactatatacacatgatttaggcgatgcaaggtaattctaggtatgctaactgttcaactattagtgaaacacagaaggtgtcaggagcccagcgtgttcctgctcacattgggtgcctgcgtttctgtggacagttagagggacagccacaagccaggacagatattaccagtaaacgtctgagggacagaggggctggggatgagtctagcagagattaacagtctcctaagtgtggatagcatacttgacagttacgctttaacaagttcctcttcgatcatgttcatgacgtcaaagtttttgtttgaaggcaacaccaccacattttacctcgtgcc

SEQ ID NO: 256 - DNA, 515 bp, Rattus norvegicus
caacattaaaatagatttattaattactggtgaaaaacatgatatattataaccaagtcatatactttattgaaaagaaaaaaatattcggtaagaagtttggcacggtcttctgctgggacctgtgtgaaatcccaggacttgtaggtcggggctgccttcgtgaggggtgtcaatgcagcccaagaagtgggtaaagtaggaagtgggggtcaaagaaaggcaatcaagaggtctgctcacaggggccttttcccacgttcatgcactgtcaggctgtatcctgggacagcggggagcctcggagagttaatgagaaacagaattgtcactttggcgaccaatgtcagaaaacaggttcctggtcaagcgttaggtactagcgaattctgaccctgagacttgaggtgtcactgtctttaaactgccaggcatggagggaagtgtccaaagatgggacttatagagagaagtggtcccggcttcctgtagtctccatctcaccagccccaggc

SEQ ID NO: 257 - DNA, 541 bp, Rattus norvegicus
caaaattaagaccagtgtataaacatacttgccaagaaataagcaacttggagcttattacattagcacaaacattacatcaacagttcgctaatcacatctgtgggtctaaaggaatcaggccgtaaaagggcatctctaaaacacccctgggcaggtccaaactcgctgggtcacccaattacagtggagaaggcagtcacagaaagaaacccaatgaaatcctcctggccactaaatgggagtcttgaaaaccctctggcatgaagagacttgtagagagtgggagaacacccctttactatggaggaaaaccaggagtccaggtattctcacacatctgacatggcccctgagaacaagtttcagcttgcataatccctgcatcaacacatgcattaccactaaaaggagtcccgttgggtcctacccggatgcccaggggtctcccacaggtaggttcatcatctcgggttttgcaagggcccgaaccaaaccgggcgatggtctctatttctccattctccagttttacaactcg

SEQ ID NO: 258 - DNA, 544 bp, Rattus norvegicus
actattaaacttcaaaggaatttattatcaaaattaaaaatgaagccttggttctagataaaggcataatcccattcaacagttgtcaaggagcgtgtgtcggcagagtctgcacacagcactgaagggcaggaggaagcaataggtgggctccagttggaatgttgaatatattcagacagcggcctcttgagttagacagtcatgacacactggatgaaatcatcgtacgagaaattcacaactccttgttgaccagaatcccgtctgcggaagctatctgtgagagccctcagtttgacacagcaggctatgtagtcatcaaaggtgatcttcccgctggtgctgtaccgctttgctactgaattcacggtttgggggctcaacctgaaccccatagtggttagggccttctgcagctcctggggatccactgtcccactcctatcactgtcgaagctgatgaagtgttgtctccagccactcagcacagtccagagctctctgaactcactgaatcccatcgtgccagacatatctctat

SEQ ID NO: 259 - DNA, 441 bp, Rattus norvegicus
cgaagaaagaaccaaaagtgtctactgtataaatacaaaaggccaaaaccgtattaacataaggtaatgaactaacagagactgtccattagagtgcggaggcctatgccttcccagctgacgccaggtacttgaccaggaagtctctcagcctggatatgtgcatcatctccttcatcgtggtgtctcggcttcgaagctggatcagcccactttccaaggtggtttcagtgattagaaccgtgaagaggatactcatctcatcgtactttgaatagagttgctctaatgaggactgtgcagtttccaaataaccaggccacacagcaatcccattttctagtaactcattgagtagcccttggcaaacctgtcggagttccacggttgggcctttccccacatctagagccaccttaataggggctaaacaagggtgaa

SEQ ID NO: 260 - DNA, 465 bp, Rattus norvegicus
  misc_feature (1)..(465): n = a or c or g or t
gagtggcagtgatttattgcatactcacatatacatacaggctgacggccaccctgccttcctagccaccatgtgagtacaaacacagttcttctggaggttttatctctatgcccttccccctacagtgggacttcttggaagtctgaaaagtggaaggtcacagagacccatgtagttgggagagagaagacaacaactatgtatgtcttgactgaggcaaaagagtcttgaggccagtggtaatcgagtcctgaacccaaggtcctccagaaaggttttcaccaactatctgatatgacatcaactttacccttgggtgtgggcagtttttccttctccttgactctcttctagatggctggcacagacagtcaggtggggctgtggttctgcactcctgacccacaagaagctagggagtaagataaccatccagccatagctcctgggtcatggtangaa

SEQ ID NO: 261 - DNA, 482 bp, Rattus norvegicus
aaggaaacaaatatttccctttatttgagtgtgttacatctactcatgggatagtcataaaaactgaaatctttaatttacaggactataaatgatgccacttaactgagaaccagccagcaaacagtagcatctgaagaccaccactcctggagggttccccacaccaagtcagcctagtagtgactacagtagattaggagctaggagtcagaagaacaatgcttgaggttataccaacgggggtttccttactcctttgccagctgcacattggtaggctttgctccaatggggatcccatatttgtgcaaagtgttcatcaaaatctccctcatgtcgttgttgtaggaatcaaagtcaaatacattccgaaccacactggagaggccttcagtagggaatttctctaagtgtttgacaatgttgacaacttctctggtagaataaggatagttgataatcccttggtcagccaattt

SEQ ID NO: 262 - DNA, 481 bp, Rattus norvegicus
caaagatcaccagttagtctttttaactgtttaaagattacatttacttatttgtgtgtgcacatgcgccccatacctggggaggttagaggacaagtcgatggaatagattctctccttttacaatgtggttcccaggaatcaaattcaggttaccaggcttgactgcaggcacatttacttgctgagctctagtctcttttctaacaattcttacagttgtaccacacatactgtgtatctgtgtttgcatgtatagtagtttttacatattaacaatttaatgtctggtgagtgacatgagaacaaacttctccaacccataaaagcaaagctacagaaagccagaggaagtatgcctgtgtgcagggttgtggggggtcaggtcacaaaacaaacctactgactaatagccatggatcaatgagcctgcaaaatgaataggagagagtacaatttagccaaatgtgttacaggaatc

SEQ ID NO: 263 - DNA, 416 bp, Rattus norvegicus
aacattaaatagaagtgctttattgagaaagatgtacttagactcaatagccaatccgggtttctatcacacagagacacaaggactaaacataggcatggaccagagatagcagagaatttggttggcctgtaaccagaccacaagggaccagaaaggaacctccattatgtacacatcaggtcatatatcgatggctataaatacccagcagtatccttgtagccgaggcttcagaggcctaaaggtgggacccactgaaacaactagtgtggcactgttcctattctcacagggccaaccctcatcccatgactctgtatggttcttggggtgattgtactcgggatcagtgtgtatagaagggtgtaagagggctctatgattcaacaataggagctgcagctttgtggtgg

SEQ ID NO: 264 - DNA, 424 bp, Rattus norvegicus
aacttctgacaactgtttccacatgctgcgtcatcctttggcccacagacccacgtgctaaaagtgtcctccaagaagacatttcctatataaacatgggtgtgatgtgtgccacacatcctcaagatgacagaaccctttgcagataaaattaaaattgaatctgagtgagaaatgaccggatttcccactttggcaaagatcaggcagcagcctcccggcagccatccctgtgtagaagacagggtgagctgtgacctctgggaacaaggcatgagacctcgtctggggaccatcaggccagggaggcaggtgggcagtggcaggctgagggcagaggagaagggcagggcagcatgggggaggggtgttgtctgtacgtgcacacgggaggccatgggtggagacgaaatcaacttcctat

SEQ ID NO: 265 - DNA, 479 bp, Rattus norvegicus
  misc_feature (1)..(479): n = a or c or g or t
aagacaggatgtcagtccctgaaaataacatttactggttattgcctttaaaactgtggattttttttaagttacagaaaatccagttctgcaccacaatacaactgtaaaaaatctgcatcaccttaaaactgtgcagtaatgccattttataactgcataaattttattagcgttctaaacagttttgcgattttttttttgtattatatgcttgcaggttatatcttagtgcaattcagtcccaaatactttaattttggaaaaaaaacatacagtttgaatgtaaaatacccctacagatataagcaggggcgtttcccccttttaatactttggttttcaatacagtccacggtatagcaagaactacacatacccaacttatatttaagttgcaagcacatgcttcagaagctacttttaaaacagtcnccttgcaaactctaccccccttaacatcacaacagtaaacgatt

SEQ ID NO: 266 - DNA, 499 bp, Rattus norvegicus
cctcatgatacaaaatttattccacctggaggactgtcttacactctgagattaggtcttccctcctttagtcccaaaacattgatgggatgacatcgaatgcaggggacagtttatatctctacgtgctccctggcaacttaggaatgtcatcgttctatgttggtcactgcttccattcttagctactgcactgatttagaacatccaaatatcagttaatctcctgtgtagaaaactatgagtcgaatagtgggtggttaccgttctattaggaatgaattgaaattaatcaacatacttcaggagagggcttcctgaaatctttctattttgaacccgtgcccatatcatagttcaataagtcgatcaaattagtcataacaactgcctagtaattaactaaatactcctttgtaacctctgacaatttaacaggagtgaattttaaaatagcgatatatacagatggcgttgtacaaatcgagaaggtcctgat

SEQ ID NO: 267 - DNA, 545 bp, Rattus norvegicus
cacaagttcccaggcctctagcttttattattgccctgtaaaccgcaacagatgaagctgaaaggaccaagagaacaaacgcatcacctgaaccacatgaagaaacagccacagaagcttgtgtgcatccgagtgaaaatacagagtatttattcctttcttcccactagaggaacagacgaatcatcagttgtcaggagttgattttggagaataatcaatgaactccttttcaggggttggatattgataccaaggtccatcaccccgggcacgcatcagtcttcgaacctccagctcctttaaccgtaagtcggccttttcagactcgatctggaggatagccagggtcttttcatagttcttttcaggtccatcgtagaaagtccgggcaatccatcgtgatattggatgcttgtaatactcccagtgttctgggatgtagccttctgggatttctgcgagttcagcttcaccaataaatatgttcaccagtgttatgccgattataactgggatcccagtcaacaaaaggtagaatttca

SEQ ID NO: 268 - DNA, 626 bp, Rattus norvegicus
caaagtagaaatttaattcaattaaagatcaaacaaagcaggtgtttgtattggtctaaatatttgatccactctaatgaatattattcttctcaccgctaggcatttatttttagatatccacaaacttcattgttaatttccctgtgaataaaaagataacagagaaccaatgtttagctcccgccctcaacccaaagtggctcactgtatgggtcagagggtgcgtctcctctttgtcaggggtcacgagcatcaaggcagaagacatggcttgtggtatacgttggtctgctgccccgtggtctcccaaatgaaggacaattttcgcagagtcatcgagaaggtaaatgcattgggtttctgaagaaacacaaaactttcttcaggttaaacactccattgttttgatgactcttctgaatctgtttccaccaggaagctgtctagataacatccagtacgtttactacttaactcttctaccagtatattaacatgaggctatgtgattcaaagtaatatctaagggattctggaaaatgttaggtttcaaaccagtcaactacagaactacttactaaatactatgttacaataagatttattgacctaaacattattac

SEQ ID NO: 269 - DNA, 684 bp, Rattus norvegicus
cacagttcagcttttattaaaacgccgtgtacagtgtggggagctggaatgggctcctgtgaaaatgatacgtttgaggggattttcccgctcttaccgtactgatcacgtggcaagtgttcttttacaaggtatatggtccctaacatccatgcagaaaatatcaggtcaagtgctttactgtcccagtgtccagtctggtgacccatatcagaggcagggcattcgcagagatattctcattccgtgtcttgagttttctttcgaagaaagtattttacgagtcatatacaaattaaacaagaagtccaacgagggccctttattaccaccaagggggggaaggggtaacttacaatcttataaccaaaggcaaaaacagcacaagaacagtttattcctgcagatgccgcagccctgtgcaatcccgcctcggctgctgctacagccagaagtcagagccccgcagtgaaggctgcacgggaactctaggctggattacccacacagaacaagtcgctcctgcccccgtacgttggaagtgctgctggattttctgcttgctcagtggataacagtgcagctgaacatgaggggcttaaatagcacgctcgcgcgcacacacgcatgcatacacacacgtgcacacacacacacacacacacacacacacacacacacaca

SEQ ID NO: 270 - DNA, 646 bp, Rattus norvegicus
gagttgccacgcatttattttcaagtcatcatcgtcatctttgtgaggtccaaaggctttgagaagtacagtgggtgagggggatgacgttgcagaggcagcccgtccatgctgcaaagggctgggtaatgttagtacggaaatccagacagacctcctcttacaggcaaccagtacatggccacatcatttattggtattcaccccctgcaggggttgtgccatgtggtcttactgctgtgttcgccatctctagacttcccttacaaaaaccttcagtccaggttttcaggccccggaggctgtcatcctctgctcccttgacctcggctccctagtagtctcgcacgggcagggtgatcctctggataaacgtgtcatatttcacttggccgttaggttcgatgcccgcttccttgaaaagctcatccacttctttgtgagtgagcttctctcccagtttcatgagtttcgaccgcaactcagacgccatgatgtaacctttcttctccttgtctgtcatcagcatggccagaaggatttctttctttgggtcctcttgcttgatttgcatgtgcataatggtcaggaaggtggagaaatccagttctccgttcttgtctattccatgagtctgcaggtgccg

SEQ ID NO: 271 - DNA, 645 bp, Rattus norvegicus
gagacagaatataaaatgtttttatttcaaaatgcaaaatgatattcgttgtaataataataataataataacaacaacaataaaaataacagtataaaaagcatgtctccttccctaatgcaaagtgacagctccttgatcgctcccacagccttggacaaatcacagtgcatgctgcacagcagcaagtcagtcccagatcccttgggtgatctgtgcagggtcagttctggattcggtggcaccttgaaacagcatgtgactctctctcgcccacctcagtcatgatctctctgtgtctcgcttctctgccagtcaccagccttaagaggcatgctgccggagggacagggcccggctgcacaaagtcgcctcctgtgtcttgccttctgctatcagggcctgcttgtggagggactgctgctcacaagcatcccgcagctctgccactgccgcctcctggtcgcgcagacggctggcagctgtgaaagggctgcacacagtctccactagaccgagcaccacaccgaagaacgctagcacactgcccagcacgtacagcttcactagcttccctcgggacttctgcgtcatcatctccttagccagaaggatcagctcctgcacactttccatctgagctc

SEQ ID NO: 272 - DNA, 433 bp, Rattus norvegicus
ggcctttgagagatttattgaagaacaagtatcagcgggacactgaaacagtcacaccaactgttagagcaaaaaggcactttactgtctttagaatctcactccatttggtaaggcactgcagccctgtcgtgttttcagtgaacacacagttttaaaggcagcaatgagtaactccggcctaagtgagcacaggcactaacagttgaagactcactcgctgtggtcacggtatgtaacttactctcaaaagagctcttactagtattctaaaaacgtggcagtatgaaaaaaatcagtttctcttcagtctgtggtctcttccaaagacacctgtatgtaaaggtattttttcttttacgtatccctgggcaacagtgaaccatgcataaaatatcaaaattccctcttagaaaataaacgtcaaaggacg

SEQ ID NO: 273 - DNA, 514 bp, Rattus norvegicus
gtaaatcaggataatcagctttaatagttcccctttaaatttaggaaattattgatgtagcaataaagatgacattcagcatattctgtcagttaactggaaatgaatctggtaaacatgacttctgatttagacaaaaaacaaagtcttcccaccatgatgataatggactgaacctctgaaactgtaagccagccctaattaaaagattttctttcgtgatcatggtatctcccctgccaagtgcagaccgacaggagcaggatgtagatcactcctgagagacacagccagaatacagcaaatacagaggcgaatgccagcagcaaaccactgaactgagaataggacccccgttgaaggaatcagagaaagaacgggaagagcttgaaggggctcgagaccccatatgtacaacaatgccaagcaaccagagcttccagggactaagccactacctaaagactagacatggaattgacctggactctgacctcataagtagcaatgcata

SEQ ID NO: 274 - DNA, 480 bp, Rattus norvegicus
gggtccaaaggtgatatttcttcacatggaaaaaaactaaattcaagccacacaagaacatgccttgagggaaacagtgatgaagcctgctcggaccacacaggagcagatgcccattcagagcagaggccgcatgaacaaatctttattcggaacagacagacgtttacagccaataagaacacaaaggccatggacaagactgtaagcgcacctgagctttaaggttctggtgaggtcctcacaaaactaacacactccacataccagccgggtaagaagaactcatgtgtcagggccagcgggggcacgaccataagtgagctgtgaatgaccataatgaggacctttgttcacactagctgcttttctaatctaatcaggttaatttcaatacagcaaataaccgataaaaaataaaaggtgccacctggtcagcaacatcatacactggtgacaagagaacgttactgagttgtg

SEQ ID NO: 275 - DNA, 296 bp, Rattus norvegicus
ggtggtgcataactttaatcccaacacttgggaggcagaagcaggatgatctctgtatgttcaaggccagcctggtctacatagtgagatgacccactctcccccgtaccccagtgaaagttctgaggctgcagctcagtcggcggagtgctttctgggcatgctcaaagccctgggtttgaaatctagcaccacattaaacctggcacactggcacatacttataatcccaacattcaggaggtagggaaaagagaaaatttaaggtcatgattatatacttattgagttcttta

SEQ ID NO: 276 - DNA, 464 bp, Rattus norvegicus
cactgtacagatatgaactggtcatagctttatttagaataaaaagcctgaaacacacccagtgatctcaataggggatgaaatgccagtcataggggtgaaataatacactgattattaccaaaagataaatacaaaatactcttttggggtataaagaaaaatgaagctttattcaaagaaatactgaaaataaatgttttacaaattgcaatcaagcacttaaagtataatttggtaatgaattctcagaaactatataatacattctgctgttggccaatgcaaagtgtactttaaactagtattttacatatgctcaaccctcaatcatcttaccattcattgattataatgattcaacagtttcttatgtagtatctcagaaaaaaaaattccaaatacaaaacattcatgccagcaaggaagatgtaaagacacatgtaaattacggcaggactctg

SEQ ID NO: 277 - DNA, 434 bp, Rattus norvegicus
aatatgcgcgcccaggctgccaacggccacactgggtcacgtgtaaatctgaaaacatttaatgctctttcccctgggtttcacgtataacgcaaaacagaaatatttcaattacatgtgactaagagtaagaaaaatatacaactctatttaaaacacttaaattaacaagaaagggtttttccattctagcaaaatattgtacatttggttttaaacaagagttaatatccagacatacattttcaaaatacctgatgctagttgaaaaatcagtgaccatgaggccttccaagatatttctaactagcaaaactgtgcacacctgggaaggcctgaaggcttttcccccctagaacacagacatcaaacaggccaataccgcaaactgaccgatgcctctaaatccggttgcttcagcttccggaactacg

SEQ ID NO: 278 - DNA, 512 bp, Rattus norvegicus
aacaaatatccagtgtgtttaatgccacctcaaacaaagacaccacccacagagcaatgtgaaaccgaaggcaacacatgacaggctcactacatttcatcaatttatacacagaaataaaaatccagctaccaagaggtcctctcccagagtgccggtcgcctccgcgacattctcccctctccctcagcattcgaaccctcttactaagagaggtagcttgtgcccaggctctattccagtagagctggagaatttatgacacactaaaggaagccaccagaccgggcttccgggcaacccacttctgtcccgttcctccttttctcttgcttagaacacaaaagtgaccagcaggccactttgtggtctcgtaacccaatattcaaagccatcgtgcttctgatctgaagtgttttctgaaggttgtggtgttcagctgataaggcctttcgtaactgattggatcactatgcaatgaaggaagggctcaggcttcctcagcaagttaa

SEQ ID NO: 279 - DNA, 401 bp, Rattus norvegicus
gcccagccctatctaaacataaaataaaactacaggactgaaattaacaacccattaaaatcggcaataagttatgaaaatcataaagcttttttttttaagtaattaagggtagttaaattatttaaagaatacaaagtccgaacagcttggggtaaggtatccagaaaggcttcccggagcaaagcagtggcccagagggaaaccttcgagtttgaaaggagggagcacatgacatggagtgcgggctggaagtctcacccagaagataacatttctgcaggtatttgtgtttctgtgcccggctcaacctccgtgggggctttgagtgctgtagccgggggctcggcatggaggggaatgatgaagcgtagccatgttcacactttttgcctcgtgcc

SEQ ID NO: 280 - DNA, 561 bp, Rattus norvegicus
acattaaaatatgagttacatttccaataaaacaggaacaatttatattgtatctacaaaatttctacaatatatgctgtactttaagtgtgccaaaaaagctgaggaatgtcctatcaaccctgcgtagtctgaggcactggccctgaagatgctggtgtttaaattgggcagtcatagacatggatctcctggtcatctccaacagacacaatttttgatccatttccattatattttactccccaaacctgatcctggtggtcaaagaaggtgtgaatacaggtccttgttccaacatcccagacctttacacttttgtcggatgaactggaaacaaagtgagtgtcatctggacagaacgcaacattcaatacccaggatgcatggccactcagtgtgccagccaaattggcatgttgcacatcatagatcttgatgtagccatcatctgaagccgtgacgaggagctgggagtcaggggaaaaggtcaaggatcgaatgggcatcgcatggccttccagcgtgtgcagaagctttccagttgcaatatcaaaaata

SEQ ID NO: 281 - DNA, 401 bp, Rattus norvegicus
acaaataaagcgctttatttatacagtctctccaggccccagatctctgccgccctaccccaacctctcaagaagaggactgaataattcattccagaggagccaagagtggctggtccacaggggggtcttcccccgacagctgcaggtcctgagtagctgggccaggtagagagcaaaggcacgaggccctgggcatcccatgccagggcaaaggccagaaccaccaaacaaggtggcatgggttagcataccagggtcagctccctgggatcaggccaacatctgtaccaccagcaccacagctctgctcataggatggtggagcctcataggggtagccccatgaactgtactctggaggaaggatcaaggcgctggtggtaagtactgggccccca

SEQ ID NO: 282 - DNA, 236 bp, Rattus norvegicus
aagggaaatcaaggctttaattgggttggaaaaccctgttgagggccaaaggctgcttcacgaccaactttgggaccaccatcctgaaaaaaaccaggggtaaggtgtgtgggtcaaaaccacagcacttgggccatggaggtccttcttgtaggaccccaatcccagagcaatggtactcacaacacccatggccaacaaacccctttatgtaaagggagttgagggcatcctgt

SEQ ID NO: 283 - DNA, 472 bp, Rattus norvegicus
ccacataatattccaaatacatgtcttacagataagggttagtatgagtatcagaaaacatcccagggaaggaagccattttagacactggaaaatgctaaccaaaaaaccaatgcttacatacacatgtctggaaaaagctcaccacctaaagtgcaaagacagaagcaactaacgttctcgctgtatgaaaatagacaatcttctgaactattagctggctttttaaataggctccactggacaaaggacaaagggtcagtcgtcagaatgaatcaggctttaaaccaatctggctttgaccccaatcaactgcaaacaaagtccaggttgaggctgactagagactacacgccacgtgggatcatagcctctagcactttctacaactcagacttaacccagttagaagtgagtatcctcagatcagtgcctcggcctacccgccgcacaaggctcccggacatgtgtc

SEQ ID NO: 284 - DNA, 419 bp, Rattus norvegicus
gaattcatacaaaataacctgggtacagaaaacatcctccatgattttccattttggagagagacatttaatggcccccatctaacagcattctctaagacttgtccagaccagaaaggctgatccacgaagactcggcagaaccactccttgctcatcatgaagccatgtttcccagtgcacaaggtcacgtgatgggcacccatcttcctctacactgatccagctcgggccatgtgcctgttaaaactcctcctctgcctgcttactgcgcaactgcttgagctgctgcagccgctccactgtttcccccacagtccgctctccgtggaccttgttgtctctcgtgcggatgttcacagtgccactggctttctctttttcaccaacaacaatgatgaagttatactgtgccaact

SEQ ID NO: 285 - DNA, 486 bp, Rattus norvegicus
gaaaaatgccatacaagaagcaagaccaaacacttacctaaacactacagccacatctgtcactacaaaggtgcagacagcaggctcagttactgcctatctcacctaagggaggggtttttcggctggactccgccggcatagttcctattttgtcaaatgtaaacaactacttgatatgattcataattttaaaaaaatttacaaagctccttcatttttgtcatgaaaataatatatctgagagatttgtaaaaacaaccagcctagggctggtatttcccatgagcatcacggtgctggccaggctgtagccccagctccattcctcaaagtgggccagggctcccagaccccgaatacactgctggccttggggagggcccccggagtcagcctccttgagccctcagtttacgaatatagggcttgctttgtgggtgggtggcagagatctcatgtggtttgaaggaaatctacttctga

SEQ ID NO: 286 - DNA, 407 bp, Rattus norvegicus
caattcaaagcaaggtttaatctgtgcacagaacagccaatctggcggccatctccccgtaaagtttgagttctggaactgaagggggtggggttttgcaagcaggaagaacaaggcagttaaggaaatcttctcagaacatctggtacagaacattctttggttatgggatggggtacagctaaattctgagaagcagacattggaacgtaagttttacagtaaacagagcctcgaaacgactcctggccttcaaatggacttgaactggtttctgactcatctgtcttatgtgttcctgtcacataagcctcttggaagctaacatttctggctattgtaatggctactagtggcaagcattttagcattctttatttgtccgtagacaagccttgtgaagcgct

SEQ ID NO: 287 - DNA, 498 bp, Rattus norvegicus
cagcatcaaagcaagctttaatagttatttctaaaaattgtctccagatcatcttctaccccagactattcatatacaatggctgcaagaattcaaattccataaacatgatactgcaaaagcggaaaaacccaggaaaatcgtttctagacttatattctcattttatatttgttactaaagacagatctcagtatctgttactaaattctaagaactaactgtggagagagttgtgctggcagctggtggctgggagccaggaacttgggaggaaaaagaaggaagttctcaaacaagaagcacatgcgcactgcactcattttccatctcataaccagaataactcagtgtagatctctattttgggaactatgttgatatcaactattgcctgcttatgggatccttttcctcctactgggttgcctcatccagacttgataagagggtttgtgcctgttcttattgcatcttgttatgctgtgttcagctgat

SEQ ID NO: 288 - DNA, 555 bp, Rattus norvegicus
aaatcagaacaaatgaagtagcagcaaaagaaccattcggcaatctggcttcactggtcctcaaacaaggagggaatgcagccagagatacatctctcagcctcagcctctcagaatctcacttgggccctaaagtgcatctgcttggtggcattgttcttcatcccggtcttcagcatccatttcgacttcatcctctgtacatactgcatgtcccgttcacgcatgagagctgctcctaaaatcatagaagtctgcaaactccagcgcagcatcaccatctgtaaagagcttacagtggcttttgtcattcatgtgtgcctgcacagcttctgtggaatagaaggacttccctttctcattgcaccacaagcagattttgccaacaccaactttctctcccaaatatttaattaatcctttcaaatctgaaagatactctatatcaggaataaaaaagctgtggactttagtcatatgagccacattcttcacaagggagcttgaatgatgggaacaacataagcagtctgttattgggatggcacctaaggg

SEQ ID NO: 289 - DNA, 580 bp, Rattus norvegicus
caagaagggaaagggtttattagacatctccaggacaggaccagcagaggctgggctcagttctcagttctcagtgaaggcagcgataaagacctgcctgtctgccgtctctcctgatagaaacggcattgtgctcacagaagccatcagctcctgcaaggaggacctgaagctccagatgcaagcttaggagggtgggatggcttttcctactttaccacagtcagctcacaagtagccaaagttaagaggaaaggagtgagagcaggggcctggtggctcccactccttaacactttccagatgattttcctctttatttataaacaagacagaaatcaaagcagcattaatttaggggaacaaaagttagacaaaaacagatcagggcagagtgtgagcatccagtagtgaagtgtgcagagccagtgtcacgtgtcctacatggtgaagcatctctgcagctgccgaggcccctccttcatcctactaggtcggcagccaggcagtagagggaatactattgacttcacgacttcaggccctgcctggccactggtgtgggaagtcccatgaattt

SEQ ID NO: 290 - DNA, 670 bp, Rattus norvegicus
ctgagaataattttaaaggaaggtgaaactttattatattttttattatagaattagaaaatgtcaaaaataattgtttggaatcacaaaaaattaaaaaggaatataataattgattcatcaaaaggcattctagctgctgttagcatattttctttctttggattatgaacttctatgatttcaactgaatacttttgacagtttccttaagatatgattttgacttattttttcttcagtatttctgtcatttcaggaaccaccttaaataaatctgcaactattccataatctgccacttggaaaattggagcttctgggtctttgttaatagccacaattgtcttgctgtccttcatcccagctaaatgctggatggctccagatattccaacagcaatataaagttctggagctactatttttcctgtctgaccaacttgcatgtcattgggaacaaagccagcatcaacagcagcacgggaagcaccaactgcagcatgcagctgatctgccaagtcatacagcagtttaaagttctctccactcttcaagccccgaccaccagataccaccactttggcaccagttagctctggtcggtcactttttgtcaatttctggtcaagccactctgatattcctgctgatgaaagaacttggtgcc

SEQ ID NO: 291 - DNA, 630 bp, Rattus norvegicus
  misc_feature (1)..(630): n = a or c or g or t
aatggagtgtgctggatgtctctacagttttgttcagatgactacagaacctggaaaagctgttgctgctgttgatgcataacacactgctattattggtctttttatataaatataaatatatatatacagataaataatttgaattttttgaaactttacctgtgctgtcaactttggaaaaaagtatccccgtttactgtgttgagttggcactgtaaagaaattaacagccatattggtctagaaatgttgaacttgagttttttccatttgtacaggggtaacacactgtattaaatatgtaaggtcttatctacgtgggtttgattacaaaaactaataaagtattctctaaattaaaaaaaaagatgtatgtgtactaagggctgagtcacaccactagaaatagtttttttgtaaaataaataacttaatcgtggggttcacattgagatcaaatatcctacaacaggtcggtttccaataattcctcaagacgtcaagtagcgactagctcctttccagcaatccagctctgctctgatgccatgtacctagagaccacatcacagattcacagaagcagggtgagggttcagcctanaggagtgcccctctacctctgac

SEQ ID NO: 292 - DNA, 531 bp, Rattus norvegicus
atctaatttcatttttgttagctcgtgctcatctctgtagaatttcccccaagaagctgaagaaacttccggggcccacgttctctgagggaagacttcctgtttctgtggctttggcgagtcctgccatggatgctccacttcctgtgaagatcaccaaacccgacatttcctttctggattcatgtatgagttcttgcggcaatgaaaggcatccgcaaactcagcagagttctgcaaagtcccaatgatcctgaaattgccaggactgtgtacatctgttttaatggaattgactgcatactctggccggtaggttccacaccacacctgggcaaagttcaagaagaatagttgtttgtgattgaggtcaagtccagggagtaatttttcttcaccattctttttaacataattctgataggctctgtatgcttggccaatccctccattatcagcaatattttctcctagtgtgttaattccattgagatgctgtccacctgctaagtcccatgtaaagtttccatc

SEQ ID NO: 293 - DNA, 341 bp, Rattus norvegicus
tttttttttttttttttggagttagattctttactagatattagttcaggtcacagtgagcgggtttcctcagaagagcctgaggggctgggaccgctgagcccctgggtcagaagcagaactggaaagcctcagaaacatgcttctgccagaccaatccaaggcttggtgtgtggagagaaggcactggtaagagcctgggcgtttacaacccctgttagagatttccccttcaccatgtccacaaactggactgcgatttcctccccacagcggctctgggcctccttggtgctggcgcccaggtggggacagctgatgacgttctcgtggtccactaa

SEQ ID NO: 294 - DNA, 427 bp, Rattus norvegicus
tttttttttttttttttacattttattcacatttattttttgcttttagtgtgctcacagaaaattagaacaccttaagcaggagttgaatagcaatgtttgtaagcaacgttacattccagctctatgtcaaattggtcaaagatcctccagtatttacaaaacacgagagacgaggtgctacgcaaaaccactgcatctgaagatttgtttttcctttattctcaaagacaactggaaaagaaagcattgtctgctgtaatcaaaaaaaaaaaaaaaaaagaaaaaagaaaaaaaaaacataccacagtataaacagtaaccattccacgtatcacagcttggttgggtttaaaatttgtgtttaaaaggtccaagatgactgcagttttacaaaaagatgggcagggtggagacttgcaaactt

SEQ ID NO: 295 - DNA, 407 bp, Rattus norvegicus
  misc_feature (1)..(407): n = a or c or g or t
catggtcagcatttctactcgggaactggttaactccaaccagaaacgaatcaggaacatgattgcacagctctgggcacagtgtctgaacagttcagtcccagtccccctcgccctcaggattgtcctcccgaggcacctccaggtcgttgaagtggaagttggccatcatgtcacgcacggccaacatcagcctgttcaagccttgattgcggttcggacccccggccactccttcctccagcctctccccctctgtggtgtaatttggcaataatgaccggaagaagagggcgattgtgtttccgtggctgactggactcagcctctccggtctgacgtaggagtagatggtgtccacgggaggcanagggtcaaaccccataacagactgtgtggtcacatcc

SEQ ID NO: 296 - DNA, 369 bp, Rattus norvegicus
tttttttttttttttttgtaaggagacactttaatcagaaagcagacatcagcagacagaacccttgagcacgctcagagcgtgcctcacccccaggaatacccctcaggaaggaggttcactctctatcttcagggtaggtgtctgaagggttaaacaaatcacagctccagcccacactggacacagaatcatggcagatcgcctagaagacaggcaggtccgtaggtcacacatgactcctaacaactccattccccaatccccccgactacccttcatgtccaacagagaatgtgctcatctctctttctgctcgggacgccacaccttccagatgaccttgcctgccctctctgccccaagcgt

SEQ ID NO: 297 - DNA, 470 bp, Rattus norvegicus
tttttttttttttttgtctataatgatccaatttttattttttgtcttaataagaatgtttatacttaaggttcccctttaattcatgatacaaaagaactctatttttggataggcactatttttaaattacatgttatttgtgtgtgcatgtgcaggtgtgtgcgtgtgttggaggacaacttgtcagagttggttctctcctaccatgtagatcctgggggaaagacaatctcaagctgtcaggctgggcagaaagcaccactatcactgagccatctcaccaggtcaataggcacagttttataaggaagttttaatttctttgttgtcttatagcactggagaatgaattcagggcactatagaagaaagtcaaatgcattgccactaagctatatcctcagtctctcacaggcacttaattcattatattaagaaaaaaaagggggggttggggatttagctca

SEQ ID NO: 298 - DNA, 528 bp, Rattus norvegicus
tttttttttttttttttgactttcgatgtttagaacatttattaaagtacaaaatagttggaattaagctgaatagacagacatattaaatatttacaaaagacactgataatagcacttaagtaacatatacaacagcacagaaggtctcggcattcacaagtcggaattacggagattggcacggatcacacttcctggctgagtgtggagatgtcaacagtcctgcctccccccagggatctcgagttcggaaggcacccccaaacaagagtcaagacttcacgtaactggcctaactttcttcatcctgctgcttgtgctgagtcatgaagacatggtcaaggtgacttcctccagcctctgatgatgttcaaaaggtacgagcaatttctcatggccaaacaaaagtccatcacatcagaggctgggcactgtatctgtactagaactaaccagctctttatgactgaattctacctataaaattgaaaacaagggctgtcttacctcatatttagtgggata

SEQ ID NO: 299 - DNA, 511 bp, Rattus norvegicus
tttttttatttttttttcaagagagatttgtcatgtattggagtagcttgaatggaggatctccagacacaaaagtttgcacataaacctgtcttaggtcccctttgtccaagttctcagtttttagaagtctctggggatttgtaagaaattaggagtaagatgacattttgtagaacagaatggagggaggccagtctcaatcatgcggtgacatagttagacacctcaatgagatttctgtcaggatctcggaagtagatggacagaataggcccctttgctcctgttctggagactgggccctcttcaatggggacatcaaaagccttaaggcgcttcatcacctcctccaggggcgtctctgtgatcaaacaaacgtccaaggagcctggaatggggtgggctgctttgggatcaaattcctttcccacctcgtgcaggttaaatttttggtctccgaaacacagtgctttccggtcccccttgaaagtaatgacctccatgccca

SEQ ID NO: 300 - DNA, 612 bp, Rattus norvegicus
tttttttttttttttttaaatgtcatcatcatagtcttttaatattttacataaaaaactgtatacacagcttatagaacttttatgtaaacatcataagctcaccactttgtcatctgtcagtttatttaaaaaaaaataaaacaaaaacaaaacaagacaatttagtagaagtaccactgggctgggaaaggagggaataaggaagaggaagctttgctctgcacagagaatgtacagaaaatttcacatagatgaagagacttgtcttgtggggagagggagggaggtttaaatagaccccaatacgtgttgccttcctttaccaaaactgtgtgtatgctacacaaatttttaaaaagtcacatggttgacatttttttcaagaaaacaaggcaaaaattagaatcttttttgtaatctccttaaagtcatcatagtttgtttaaaaaaaaaaacatcagaagtagatgaggttacagcatacaagtgtggtcaaaatgctgccttatgcaaatgacaagtgcactgggtgtcaaacaatgggacaattgtgcaaagaattctttcatcaacaacaaaaaaagcttcagcctttaaataaattcagca

SEQ ID NO: 301 - DNA, 534 bp, Rattus norvegicus
tttttttttttttttttgcctcaaaaagtgacatttattcaaagagagagagagagagaaaaaaaaaacaaaacaaaaaaacaaaaacaagatgtccatcccttggctcccttccctcccccctccagctgttcctcagccctgcccccaggactgaaccctgggctagggccaggtagcaggacagcccctcaaatgaggtcagcaacgttgaggggcatctcttcaatggaggtgttgtagaaagtctcaatgtctcgaagagtcctcttgtcttcttctgtcaccatgttaatagccacacctttccggccaaaccgaccacctcgaccaattctgtggatgtagttttccctgttggtgggaaggtcataattgatgactagggagacctgctgcacatcaatgcctctggccaacaggtcagtggtaattaatactctgctatagccagaccggaactccctcatgatcacgtctcgttccttttggtccatatctccatgcatggcagaaactgttaaatcccgggca

SEQ ID NO: 302 - DNA, 580 bp, Rattus norvegicus
ttttttttttttttgttactttgtttttagctaaatttaacgagcagtttattgtagaaaagaaaaccgaaggacagatcaaattgaaagaattactgttataataactttaatttatcttgcattttacagaagtctatgaacgattttaagaagcacctccttactccatcacgtttctctgacagttgttaaagtaggcaacgagtatatcaacagcttgaataccggtatcttgcaaggatttcagaacaatcactcgccaaagaacttggcagtttctatcttgtttttaactcaatggtacatccactctgatggtaacctgtccagccaaatctccaccacattttgaaaaaatcaatggtgattagcaaattagttagctttggcacggagctgtgctcgcttgcctgtgacagcctggaagccagttttgatactggccacagagcatcgagaatgacaagtttcacactgtaagaaatagagtcgggtgtccttctgtaagattgtgtccggtgaccggcatgtgtgacaagtgacgtattccttgatatatcttctcaagacgttttct

SEQ ID NO: 303 - DNA, 226 bp, Rattus norvegicus
tttttttttttttttttcaattatgaattatgataagccacgcccagcacctggaagacactgagagtcacttactgtgcacggtgacttgcacgtgggctgtttcaatgttggcattactgtctaatgttacaagtgtgtacaatcccgagtctttctcagtgaggtcctgcaggagcagagatccgttggtgtaacctgtcgctcttcctctgtcctcgtgccg

SEQ ID NO: 304 - DNA, 556 bp, Rattus norvegicus
tttttttttttttttgtcacagaacactgtttgcagtagaggaaaccggcatcacaggctggtagttgtcatggtttcttcacaataaccaggacgtggtcatccttcagcgcaaaagccctcacggcacgtaccctattgaaattcaggacggctccaatattctctgtttttctttcaccattttttttaaaaataaacatttttttaggtttgtccacaagaaggccacgtaggctcttggctagcggaagacagaagagctgcacacctgggctgccgcccgcgctgggctggcagtttcgtcttttttttttttcaactcatttttattaaaaaaataaaaaatgctccaactatcagttttacaaaatctctaagggaaacacaagagcaaggtgctgaggtaaaaaacacctgaggtagctttatttgtgtgtgtttttttttttttctcatttaaaaaaaaaaatctgtaaatttaacgccctgggccaacgacctcgtataaattgctattctcctgcgctttaaatttttaaagaaagaaataatt

SEQ ID NO: 305 - DNA, 393 bp, Rattus norvegicus
tttttttttttttttctatgttgataaattcatatatttttttcacaaattcacagtgacaaccttaagaatgtataaaaacaaatacatgacagagttacagaaaataaactctaatttgagagcacaattgtacaaaagggcctacagccatcacaggttaattgatataaagttatttcagtaaaggaaaagaagccatggtgcgttcctttgattccttgatctcctctcagcgtctatcggcatgcagtccttacagccgaggaatcttgggaaactactaccatactcctgacctttgttcctcatttccagttctttcaaaaaacatgaaatctatgaggaaacaagcgccaagcatcacagctttcatcttcacatccaggtcca

SEQ ID NO: 306 - DNA, 458 bp, Rattus norvegicus
tttttttttttttttttagaatacaaaataaggagctctttattattatttatacaaaactggtacattaaaaaaaaattaagattcaacaactctgctgaccccctgaggaagctaagagcttttatgggtccaccaaaggagcccataaatgattcagtcacccaactcctggccacaggaacaaggcacacagctccagggccattcatgtggctccatcactggctctgtaggctgacttcccttcattaggctcggcaagcaagccaggctttcccggaccaatgctcctgagcgaggtcttctctggcccaagctagagcattttatccgtgtaaaagctgagtacttttatttcttaaacacttccaataaactcctagcattagacactttattacaacatatacagatttgatagtttaccaagaaatctagaattcagctaaatcctc

SEQ ID NO: 307 - DNA, 309 bp, Rattus norvegicus
tttttttttttttttttggagtttttcagtggtcttgatgatgtcataagaacatttgtaaaagggaaggcttttagaagagggggtatgggaagggtgctggctttaaagcagaggaatattccagtgctgagaagggtgatctgtactgaagagaggaggagaggactctctgaagcactcttctgaagaaggctagtcacaccaccaactcagctttctgccagtgaaactcatttcagatttcggagctccacaacggaattagtggagcttcttgagatacaggtagatcccatttttggactt

SEQ ID NO: 308 - DNA, 441 bp, Rattus norvegicus
tttttttttttttatttaaataaaatagttttatttatattaaatgacttttaaaatgataaaacacttaatagatactaaataaatagaactggctgtaaatctaagttctctgatgataaccatacaaggatccgcctgggctgattagtttgggagatgatctggaggttggtaggactctccttcatcctcaatgtaaactgtgcctctggtttccaaagttccccttgtttctccaaacgttgtatgtctagaaacatgttttaagaaacaaactggagaattgtatgggtttagagtgcagttgagaagagaatgagggttgttttgtttaaagtacagaacaagaaacttccactgcttaactgattatccagaagtgaaaaagaaactgagctaaaggttgtgctggtggcggagaaagggagcaacaaagat

SEQ ID NO: 309 - DNA, 565 bp, Rattus norvegicus
tttttttttttttttctgttattatatgtttatttaactgatgaagcgagagacaaatcagggggctaaggtttgatgggaatagaatttaaaacaaattcatatacaaaaaattttcagcataattccaaagtgtactttcttcagtccagaagttaaattccataaaactacattccatacagtaagtaaatgtcgttgcactgatggcatagtgcgccatttgtgatcttgatcatgcattgttcatactgtgcaaaaataagacaattccatgaagcagaaagagtatacttttagagtcgatgaatagaggaggtgcgttaagattactgtatcacaagtgtggttttgtagactcggtgatactgaactgccgattcggcttagtagcttcctgcattagctcctgcaactgtccgatttgctcatcacgaaagtcattgagtttttcttctgggagagaagtgccaaagcatgcttttccgcttgaactttgtctgctgtccttagcttgttgccacaacactgctgcatatgtctcccattcctttaagaaacgctg

SEQ ID NO: 310 - DNA, 355 bp, Rattus norvegicus
tttttttttttttttctggttttgcgtttttattggggtttatcatgggcaggaggaactgccaccataaagtatgcccctcccaccaagcaggtccattctaatcctcctcccgggccttctgcgactttttctttttctttgtgctgctctttgtgcagcttgcagcagcctcaggctcctcagaaaatttccttttcttcttaggggtgatggggcttgctgcctcttcaggttcactggccacttcctctttaggtaaggacttctttttcttaggaacacttatgctgctagtagccatctcttcaagatcactggccaactcctccttgggaaaagctttctttttcct

SEQ ID NO: 311 - DNA, 384 bp, Rattus norvegicus
tttttttttttttttttcaaagaatgtaattaggtatttatttagtataaaaggcctgtgcacagtgtaacaaatacaatttttacagctgttttacaatcgtggcgtctgttcatttgtgtttcatgctctgaattacttcatccagtagtttgctcacttctttgtgtctcgttactgctcgactcatgcagtcctgaagtttagctccagtcagcccactcccacctggcttgtgaagacagcacagcttgccttcctcgtccattactacggttaaggttcctgtggacaggtgctcctcctccccggtaggatcgactatcagcaaagtgtcatcaaacacagcaaatgaagtagcaactgggtttgctctaacattca

SEQ ID NO: 312 - DNA, 538 bp, Rattus norvegicus
tttttttttttttttttacaagtttgagatagttttatttacactcaagttgcaaagagtctcatgacatctgtccatacaaaataccgtaacaatggttacaggcaccggtaagagctactctaactatgagccctgtctttttttaatgcagtcttttcttttgattacaaataggatatatgacattaaggtacaagacacttcaaagtcatttcaccgacttcccaaacttgactcatagaatgcagagcacattaaaagatttttcttaaaaaaaaaaaaaatggaaccagccaccttagaaatactctgcaaatatgcttacaagtttagaaaataatgcttttttaatatttcaagagataacatgataaaaatgttgcctgctgtctgactttctgggattcagcccctctaggagctggtgtgccttggtggagtcgcctgagactgtctcgaacgtcacacagacgtatgtgaggcgagagttctccgtcgctgggtgactgaaggctttgcttttatcatgcatttg

SEQ ID NO: 313 - DNA, 527 bp, Rattus norvegicus
tttttttttttttttttcaccgtgtcagaaactgtttaatgttagaattacaggcttttggcaagtatatggcaagcccatctgtccgttcccatgtccactgagaacacagcagagggggcatgccccaagctctggcctcagtccagacttcagcttgggtttgtccagcgagatgtctccagtccatgaaagcccatctggctacagcttgagttcactgggcattggctcccctcttaggccagccagcaagttgttagccgccagcaaggacatggtgttgcgagttttgtaggtggcactgccgatgtggggcaggatcacgcagttcttgagggtcagcagggggtggcttggaggcagtggttctggggtggtcacatccagtcctgctgctgcaatctgaccactggctaatgcctggtacaggtcttcctggtttaccacatctcctctgctgatgttgatgaagacagcagtgttcttcatcttctggaagaagtccttgttgcagagccccctgg

SEQ ID NO: 314 - DNA, 520 bp, Rattus norvegicus
tttttttttttttttttcgtgggagtgttgttttaatacagtctgtgccaagcaacatcataatctccaagtttctcctatctttaataggcaatattcagaatttaaaaaaaaaacaataacaacactgcagtcataaaacaggccagcgacacttttgaggagacttaaaaatgagaagccatgaattatcttctttgaaaagcagccatttcaaaaggttttctttaatatcataaaatattctcatggacaagtgagcgagcaaacacacatgcaccagtgtgcctctgacaagagtacccacctaccccacccccaagtggacatgaaattagagaaatgaacacagcagatggaacaggtagaaggaaaaaaattcagtaaaaagaatggaatataactttgtgcttggttattttcctatgtcacaacaaaaacatttcggtgcaaataattaatttttcctcttttccatttaagactggtggagaaaaaaatacttttctataataaaata

SEQ ID NO: 315 - DNA, 455 bp, Rattus norvegicus
tttttttttttttctttataaaaattagtttatttttaattgtgcgagtgtttgcgaatcatgtgtgtatgacctcagaggacctcctgccgctgtaagcgctggtgctctggaagtctcttaattgctaggccacctttccggttccatgtcaaaggaattcttttctcccagaacaatggtgcgttatgagtgaagaacagaagccaagtgtggtgatgcgtgtctttaaaagatacatttgggaggctgaggccagcatgggccatacagtgaggcttccctctaggctagagcatagaccatccatgcctgtttaatggagattctaccctagcagctagctgtgtgaccttaggaagctcgcatgccctctctgagtatctctacttccccactgcagcactgttgtgtgaccaaaaaaagagttggtccaagtagagctgacacgtgac

SEQ ID NO: 316 - DNA, 118 bp, Rattus norvegicus
tttttttttttttttatcagtcttataaacaaaactttattaaatggtacagaagatcctgtgggagataggaccaccaaccgtgcctgtccagaacaaaagttggctgacccacacc

SEQ ID NO: 317 - DNA, 502 bp, Rattus norvegicus
tttttttttttttttttgcatctgattactttggtttatacaagagattcttacattgtttaaaattaatgacagagcacaaaagcacaaaagcaagtctcaaggtgcaaagaacgctctgggatcacaagaagcgaagccaaaaggttgacatttcaataattggtggattgtactttaaacacattagtaccccaagtcagttatacaatgacatatactatcacttgtagacaaagattaaagggaaaatcagtacattcacagtttcaacagaaatatatgattacatacatgattacatatatttaatttcactttacatagacacaattatattgaaattagatatggttagagcataagtcattaaataatgattttacttgtattacataataaattttacaacaagaggattatgtatttcaatatggcatatataggttttggatcacaaaaagcaaaaatatggtaaaataatagagttaggagtgtcaca

SEQ ID NO: 318 - DNA, 505 bp, Rattus norvegicus
tttttttttttttttttgacaagcaacacactattttttttaaatcaatgttccaaagaaatcaaaatttagaaaaggaaaattattcgcaatttcactaatggttactcactaatttgttacattgtagcaaaaaacaaaagtagggcgcagcatacaaaccaaacatgaatgtggaaagtgctagaacaagatgaacttgatctctgacttctagaaaggtcttccaaggttcatgcattttacttgaatcagcaagtgtttccctgagcgttggtgattatgtttgtcgtaatgctaactagagaggaaggtaagaagcacgttctatggtccttggccatcagtagtttatgatctagctatgcctggttataaagatgcacttactaattctaagaccttaaagcgataatcgcctttgaaagccaagcatcatgactgttcaataatcctgccgtcactcgcaacagctttggcgtctcctctactgagactgtaactc

SEQ ID NO: 319 - DNA, 495 bp, Rattus norvegicus
tttttttttttttttttaagatgtgtaagcacattcagacctttatttttatttttttatttatttttattatttttaccattttgacagtttctttttctcaaaggtgatttgaacatgttcacctgtacactttggattcattttttaaccactgtttctctgtggttttttttccacacttgttttcctctcttaagtcaatcttttctctacagcagacaattatacaccttattcctattaaagaagttttttggtgttctgatgagcatttctagtgaaaactagtttttctagaggtgagaacactgaaacacaatacttttgttgcaaatgcaagggataaatttagagttacctggtatcacaatttcaaacaaaaccaaatgatgccattgttctgtgtcaaagcaaaagaagaactttaataagcttttacaccactgcaaatacaggaacagtaacccatgacatgcaacaaaagtaattttg

SEQ ID NO: 320 - DNA, 483 bp, Rattus norvegicus
tttttttttttttttatagctaaacaattttattggctttctgtgaaataaaaaacaggaaccgtcatggttaaaggcgaatcagtgtcaaccaaatgaaccagccacttggttcgagcagccgtggagaacacgagaggacattattgcttacgccccatgttcgtgcatgtgtctgttgtgttttggcaagaatacaatcggatggagctttggttaaggtcgactaggactactcattgaaaatccctgcatggcacctcctcaccagctcctccactccaacccggggaatcttcacactccattaaaaaaaggtcgtagaatttggaagaagaggtagcgaggtaaatgcggtgcgcaaagatgtgctcctggtcgtggaggataaagaggacgtcggcgcataggggattgtccagtaaacaggctgcgtcgctcgtcccggtggacggacactcggggactttgatgaccggggga

SEQ ID NO: 321 - DNA, 423 bp, Rattus norvegicus
tttttttttttttttatggccactaattgatattttttatttttataattaaaaataatacagtgataaaaatatctcctgccttcaagaatatgaatttaggtaggagagatggctcaagcatgtaaagaggcttgttggcaaagctgaccaccagagttgtcaggacacacgtccatgttggaagtgaagagctgcttcccacagttgtcctctgacctctacacatgcacaaacatacaaaataagggaataagtaaatgaatttttaaaaaaatttaaatatgaacttagattcaattccaagtgaacatttgattttcagtcataaagctagtgataaaattgttggacagtagcatgtataccctttaacccagggagtccttagacagcacagtaacttagacttcctagtactca

SEQ ID NO: 322 - DNA, 423 bp, Rattus norvegicus
tttttttttttttttttaaatttcaaaatgatttattggattttaaaacaagatacaagaaattctgcctgcaagaaacgcacatccatcacatagtcatacaaaaactaaagatgaaatatcagaaaattatattctagaaaattaaatcagaaaccaagcaggagacttaaagacaaaatgttcagaaaatataaaaaacaaggtcactatatatcagcaaaaggaattgtactaggcagcttttcatcactgaaacaagtaactgaaagaaacaattttaaagaaggaaaggttgattttggctcacagtgtgagaactttcagcaaaggctagctttctccacagctctcacattggagtaaagcatgacagtggaggcaggtggcagaagcttattatttaatgacagagaagaagca

SEQ ID NO: 323 - DNA, 424 bp, Rattus norvegicus
tttttttttttttttttccagatgttcaagtttattatacagtcacaagttacacattggaaaccaagcagagcatggaacctgcttttactaactcaaaacaagctagccaatgacaggtttcagaagagactcgttttatgtctcacccaatgtgggcgatcacaagagaagccaaaaaaaaaaaaatatcttccatgttacttagagagcaaagtaatttgatacacacagcttccaagttatcttaatatactgaagatggcttaaaactggtagggaatagtttgtcttccacctaaaataaaatgcagattggatggtttagaggtaaaacaaacaacaaaaaaccaaaacgaatcaaaaaaagcaaaaaacaaaaaaacttcacctgtatatctacaactacagcagaattgttctt

SEQ ID NO: 324 - DNA, 621 bp, Rattus norvegicus
  misc_feature (1)..(621): n = a or c or g or t
tttttttttttttttttcaagtttcagaaagggtttatttgacttacaattactggttaaagtccttcatttcaaggaagtcagggcaggaacttgaagcaactagttatactcatgaataaatgcatgcatggagagtgctcagcttgttcttatacattccagattcctttgtgtagagaatggtggtgcccacagtgggcggtcttcccttcacaattaacataatcaagccaatccctctaagacatgcccagggaccaagctaactgacacaatcctgcactgagaccctcttcctaggtgatgctagattgtgtcaagttgacaaagctagccagcacatactccatcaaatatacgtagaaatatgcaaatacctctcccctaaacaaggcactggcttgatacttaccatatccaaactttgcttcaaattattaaggacctgccctacttctctattttccatttacattttaacattccttaaagtctagtttagtatatggcacagagaatatacaanacaatacttgaaaaccacaactgcttcagctagacaggggaagaaaattgtatttgatatttcagaccaatagataggactaaactcaaata

SEQ ID NO: 325 - DNA, 408 bp, Rattus norvegicus
tttttatttttttttttgttcaaaaatagaaatttattaaggtgtgtttgtttttaattcccaaagcttcttaaaaccgtcttttcattgagcccatgaggtacttgaacgtagacattatacagtatgtagcagtgattgtcgtgtgtatgtgtgtgtgtatgtttcactgtgtatctcaggctgacctggaactctctctggcctcaaagttacaatcgcctgcctccacctcccagatactggagattacaggtctatgccccattcctgtctcttttctctgtaaagtgaaaaggctcaaatatctgaagtccacttaacccctgacacgacctagctttggtttgactattattgcacccccagtcagtacccagcccccagcacacccctgttgagtcagta

SEQ ID NO: 326 - DNA, 318 bp, Rattus norvegicus
tttttttttttttttgtctttgcacgtttttatttaattaccattctctgaaggtgtagccagtaatggctttgcaagccatagggcagggaagagggtggttttcctggacatacagtggtgaacgagcctcggtggcctcccatggcagcggggtgaggagacagggagggaccgtaaagtgacacatgttcagcagcgtgagaccataaatacatcctttacaccagatcatatgtacacacgtgaacatatatacacaagtataaaaatacctgccctactcggcacagagtttccaaagaacagaatcgattt

SEQ ID NO: 327 - DNA, 504 bp, Rattus norvegicus
tttttttttttttttttcagcttaaaataaatttattgtacaatacaaaatgtaggcatactggaaaataaaggtacatcattaaatatacaaagcaaatgaagaaagctcaacaacacaaatgttttaatccaaacactaagataaaatgcacaacatttatgctaaaaacaaaatatttcaagaatatgcatttcaaatgaaatgttaatgatggcaaaaaaaaaacagaaaaaaaagaaaaaggaaaaatatgctgtcatgtaaatgcttgaatatcaagaatcaaaaatggtaggaaaaattaaacccaacaatactgggtacttctcaaagaactttatttgaaaagagagtatttatttgagaatactgaagggaactgagataaatccacaaagtggcaaagcttttctttcctcttcttgtctgcagatgccttcccagtacctcacctcctcttacactcacaccttcctatacacatttttgaatgcttgttct

SEQ ID NO: 328 - DNA, 425 bp, Rattus norvegicus
tttttttttttttttttcatttggcaataaatatttaattaaaatgtacgtgggtgacagattcaaatatggttaagcagtgagaaagaaaaattcaaatttgtacggacccttcaccacccaatcttatcttgccccagcatttagagtgattaagcccagctcttcttaaaccactgtctttagtttcaagccaacgtcggttgttgggattcttctacaatgtcatcggcgggtacccgtacctggggcgaccttgtctgcgctgggtgcagatgctgctgcggcagcgttcctagcccgaatgtgggaggccaaggcacttaacatttcctgagtggtgaggtgggctcctcgcataatcagccgatacccatctccgaataacacgtccacgcagggctcagagccgtcatgcctcacgt

SEQ ID NO: 329 - DNA, 314 bp, Rattus norvegicus
tttttttttttttttttgatataataagtatatttgagaagccagagctctggggatgacacgtatctcacacaggagacagaggagtcaaccccgagcccaattaggggaagggatttatagggaaaactacatggcctcagttcaactctaggccaccctgcttctggggcaagctgaccctagttcttgttttcctcagaactgttgtgtcaggccttatcgaggccagatggtttgtggtggctatagccaggctacctcaccaaaacatgtgatgctattcttttgggaggtgcacttgtcctcacagc

SEQ ID NO: 330 - DNA, 341 bp, Rattus norvegicus
  misc_feature (1)..(341): n = a or c or g or t
tttttttttttttttttccagaaaatacttgagtgtaataaggatttctgcctgacattagactctcccgacatgcaagtgttgggagctcaaaggattcttgagctgggaaatcctcaagggagatgacgtagagggagccaggcgtccaaggcgtacgaacaaggtttaatgctgcacccgtcaaggcaggagctccccagatcgatgcagacttcttcctccgtgtcctccacaggactaagctgtttctgaggcctcagcgcatgctaccatcgaggcctgtggtggggganggggctgcctaatcgtccttcttaaacttgccattgatgtacggc

SEQ ID NO: 331 - DNA, 362 bp, Rattus norvegicus
tttttttttttttttttaaaaaaataactgtttcctgggacctctcccctatcttcccagtgtggtcagcctgagaaccctgctctgatgtttcacccagagaagccaaggcagggtcctgggtagggtagttaggaaagaagggtaaggaaagggaggaggtgagtctctgaaattccccctaccctcacttctaacacagatgggagcactctccgactcctaacacagatgggagcactctccgactcctaacacagatgggagcactctccgactcctaacacagatgggagcactctccgactcctaacacagatgggagcactctccaacttctaacacagatgggagcactctcc

SEQ ID NO: 332 - DNA, 493 bp, Rattus norvegicus
tttttttttttttttttgcaatctgccatgattttattgatttcagcttctaaacgtagaattctcagattaacctgacataatttgttcgggagagagggacactgccattgtgctttagtgtgaggtgggtagaaccggtggtgtgccctccgggcctgtgaggtgggtagacctggtagcatgccttccataccaaatagattcaccttctcaccaaccctcttcctcacttgtctggtcctacgccgtcgcaagagagtagaaatgtatataggaacagaaaatcatcctgattttctcttgagtttgttatgcttcctagcttgttgtggcaattctgggttctttagtataaagagaaatcaaaaaggaaaaaaaaaactcttatcttggcttaagaagtccagggatatctggtagcctacacatatgcacagaatataaacatatttatatgttctatgtacacagtggatggtgacctattcat

SEQ ID NO: 333 - DNA, 466 bp, Rattus norvegicus
tttttttttttttttttgactaaatattttgaggtcatttattcctggatctgctttataaaaggaaagtaaatgcagaagaaaattagttggctttttatataaagttggctagtttaagaaaagcaggtttagtgttctttgtagccacccagtatttaaggatcaaatgtttgctgctgctgtaagaccccattttaaaagctgcaggtctagaaattagtgtttccttcaaaactggtgaggactcaagtgctcatctttatcctcgacactgacaaaagtctcttctgtgggaggtggagggtcagcaatgccagaactgtgggtgaagaaactggattccagggaagatgaactggacatcattggtgggtactggtactcatgggcacttgctggattgatctctgccaatgtctgggcatctgtatctcttgcgtttaccagcctcagaaagagctca

SEQ ID NO: 334 - DNA, 421 bp, Rattus norvegicus
tttttttttttttttttaccttatagcttgcatatttattgaacaaatacgactaaaatagctaaaatacattgggtacttatggaaggaccacatgttacaaaagcctgcgttttcagcagcgtacaactgcaactctacgtaaatgccacaaatgcacaataccgtttccttgctctatttacatagctgatatatctaccctaacagaggtgggtcaattacagttttgtgattgctcccgctaccgtgactgcacatccacccagggccagtcacgagaggacagcctctcacactcttggtagcatccgctcagcctacaacactgaagaagaaagccacactcaagacacaaggaaaacaagtcagtccagtctagagaagaacattccgggaaacagagtaccaacaccttctt

SEQ ID NO: 335 - DNA, 571 bp, Rattus norvegicus
tttttttttttttttttgaattttaaaaaggaaatgtttattgttgtgttacaaggtgattataaactcctctaaaaaaagcaaagatggatttaaaatatcaatatacatattcatctaaaaagcaaaagagaaaaaaaaaaaccgaaaccctgcaaaatgcggggtcgccgtaattaaacatacacagagcttgtatactgcaagacaggtcacacaccaaggatccttcaaacacaaacgctcctcaccttcttggttggtttcaggtttttgtgtgtgtgtgtgtgcgtgtgcatttgtttttttgttttttgttttttacaaaagtttaaaatattttaaaaatattttgaagtttttaaaaaatgtcctgatgagccagacatatttctgaaggaggcaaaacccacgttctcagcttttctcttgtgctaaatacagtcacagttgttagggattggcaaaattggtttaaaagaaatgtaactaccatctcattttgaagccaaatatctaacaagatgccctgtccttcggggaacatgccagaacatgcctgcaatgacac

SEQ ID NO: 336 - DNA, 620 bp, Rattus norvegicus
acttcttctcaaatccagttttattaaagtcgtttggcaattttggtggcagcttaaggtggtggcacacattacacatgagtttcagtttttatttgcaggaggtctggatacatgcacatttctggccccactgctgttcactaccaaacaccaaactgctatctgcatccctagtctccacagcataggaatttgtcaaacagggttgaaaaaactgaaaaccaagatttaaaaaaattcttgtcaaacattaagaacatacaaagtaaattaaagatttccacacttagacttccaggtatgaaaacagacatgtgatagcttgtggtttcttcatttttacttattgattattagagttcagagaccagaagtgtttcctaaggttgaaaaaaaccccactgagaactcccaatagaatttccatggagttagaagacagaagaactgggagcaaggtgatttggctattaaaaatcaagtgactttttctttagtgggatttttctcctgcatagctcaggggatggtttgcttccttagtatacacactgagcatggacttattaaaatgtataactggacagcaaatgatgggtggcctctcttatccaagg

SEQ ID NO: 337 - DNA, 588 bp, Rattus norvegicus
aatgaaacaaatccaaaagatgtacagtcaggctcacgttgtgcagttcacaagcatggaagaaacaaacagacagaaggacagagttccaacagaagaagctaacccaagaccaggctggacttgccgccaggggggtttctcctggatggcgctggggccggagccactgggctgggcacaggagcagcgggcaccggcttctcttccacctgtgccaggctggcttggaagtctgtgtccacattttcatgcacatcactttctcccttgaggtctaagaaatctccagagcttgcttcagaagagttacttctctgtgttccaggcgactccgaatcctccctgccacctgctgacttggcccaagatggggggttttcttcaggtgtcccaaagatgttagaagccatcttgttcttcctcacgggctgttctgttggctcatcaaaacctaatgaaaaattggacccaccacctggaggccgcaaaacccgggagctgttcctgctgttagggtctacacccttgaaggtggtggcagtggtcatggcgcaaaggggcgaggtagactggccctgaaaacgc

SEQ ID NO: 338 - DNA, 550 bp, Rattus norvegicus
acaatgttccctcataatgcaagacattttggacttcacatttttaagccagaggccactcctgtctgtttctttagagtggtcactttagaaagcattgataggcggttgttgaacgttgccacggaaacacattcaagatgttggtggtcttctttgctgcctgctttgggttaaaatcaacatgaagcacacaaacagaagcatacgtacatttgcagcaaaggccgctgcaaatacaaccccaaagagaggtggggctcagcgatccatctcacagcaatgcagggagcctttgtgcctcctgcacaaaattagcacattcaggggagacgtgtgcctcacaaagggccatgtggaaagagttattcactctcatccaaaaatgaagacagtctgagggacaaaattgttcatggactctgctcccaacgctccccccattccccaaacaagccaatgctcaagacacctaccaaagccatgggcaaacttgaccatgagcaaacaatatgaatgagaacagaatgacgtaatgccgttgtgcctg

SEQ ID NO: 339 - DNA, 522 bp, Rattus norvegicus
attctccacagagttcctttctacagctctacagtataaatacacagaggtgaccttctctcaccaggacaaaggggtacacctcacctgcttggtccccactgccaaaccctcactgttctgtgtggggcccatcagcagagagtcactcatgcggctcaagtgtgcgcgccaagtccatgcttgggtagaaacagctccgctgctactgatgcaagttcctgaagatctgccccaagggcggtccatggctacagaagggtcgcaggcagaagcccctcatcgttttcatcccaccctgtgctgcatgctcccaggaaccatgaaataaataaataaatactctgaaaaagctctgggggaggggcctgagccagctcatggcttaagaagaggtgcagcgcccccttggcagagaagagggaacataaaactggccatgtgccctatcctacgatgtaaactcctctctaggaacagccctgaaatccaggcgatccatacttcccccaacctcaaagg

SEQ ID NO: 340 - DNA, 461 bp, Rattus norvegicus
  misc_feature (1)..(461): n = a or c or g or t
gagcaaatgttttaatcaacgttgagggaaaacactttggaaagcatacagaaaaggtagttaacgttgaatcgcttggaaacggaacctcagggaggctaacccaatgcacccttggncaacttttgcttcctaaattccttgtctgacgtctggtcccagtgcacgtgggaatgacagctgccacgaggggagtgccggcctgctgctgctcagagcgtgcgtggggtgtactcaggcagcctctgcagcctctccttctcagcctcgctctcatctcgtgctatcaccaatgaatgtgaatagcccatggccacctgttcggagaagatccatccagagtcttcacctcctgagctgcagtagaagacttgggcttgtggtccccatatcccaattccccgaaggttggtgatgggccccagctgatggtactctcgtccgncgctacgatgatgctg

SEQ ID NO: 341 - DNA, 596 bp, Rattus norvegicus
gactgttaatgaggacgagtcagtttggagaggagcacgcagtatttgcttggcgttgtcagccttgcaccaaggtcccatgcctgtcagcctagaatgcagggcactaagtaaagcatccctggctctcagctgccactgggctcctagtgtacaagatccaggatgagacgggactgtagataaagagaaggtcaagagtggcgaccagtctgtgagcttgggaagggccgcctgccccaagaagcctgcagtctgagcctctgtcagggaggcaagcttctgctcacctacaacctgagacctgtctttttgagacacaaatcagtctttccattgaaacgagagttggggacagttttttcaagtgggaacaggatgaagaaagtgaagtatgggttcaccagttggtgtagtaaatagaggctagcactgtgagaaccccactggcagtgatggcccaggctatgggaacccctcatgttcagaagcgtcagagctgggccgagctgaggacgaagttcatatgctctccccatgtcgcccatccatggagctcactggagctctcctcttcaggctcactgctgcctcgt

SEQ ID NO: 342 - DNA, 401 bp, Rattus norvegicus
aaaggactttattgtcctgcttctacaccataataaaaagggacctgcaagctccaggcctgtaccatttgttatcactgtgaaacatgactcacttgaacatatttcccaccccgcccccagacttcacaagataaatatgttacaattttttgaaaacagaataaattaataacttaaatgattaggcaccaacaatgacttgaaaaattaaatgtcaatcttaaatggtaacaagacacgatgtaagactaggctgcttctatttcatttttcttcccaacaaatagtaacaatcctgaatgaaatgattctaaatttcaagacacaaataaccaacagattacacaagaacacacaccaccagataccacaacagcacaaattattagcaggcgccc

SEQ ID NO: 343 - DNA, 541 bp, Rattus norvegicus
aatgtgaaattataattaacatctccatattaagcttttggatcttgcctgtatcttacaattaaagcacactttactgcggacttagaagcacgcgagcgccggcaagatgaattcttcatgcctctgtgcctattcgttcttcaggtgaagtccgggcggatccgcaccatcgccccacatatgctccggcggtagttgcttccttcactttactgtgctgtgtttactggtccgtggtcaatgccctggcgatgaggcttggaccacattacagcgggagaggttttccaccttcccgtccgcttgctcgcagctgggtccggatgtgtattttgctccttctggttctccgcacttgctagtgggctgcgaacaaactaaggccgacttggtcttcagaggcacgcggctccggaattcatagcggtcaactcgccccggtgggctcagaggccgggatccagcggcctcagaccgtgcctgtcgacctgagcgctcccagtcccgctcgaacatacgcaacgcgaagactgcattc

SEQ ID NO: 344 - DNA, 650 bp, Rattus norvegicus
gcatgaaatggcttaaaggatctgatatagaatttaaattacaaaagttaaaatacaataaaatacaatgccaactacacataaataaaaacctaattttcatataaaaatactgtaccgctgttaatacaggaagctactgtttttcctccccgtgtggaggattaaacccagagagttgcatgtgcttcgaagtgagctatagtcccaggaaagaattttgatggtattatttgttttaaaagtcccgctgtgtaaatgatattaaaatctaagtccatgcaattgcaaagtcttcagtagcttatgaactcaactgtagtgtgatgtgtacctgttctaagtacctgtgcaaacttactgagttaaggtctaagtctgaactgctttacaatcctacctgccctaacgtaacaccgcagagagaagccccacacagtaaattagaagcagtaagtgaaaaggtactatgctatacaacgtggtaactcgggtgctatctgtcttatgtacactgaaattccaccacttaaaggcctaaaaacacgtcagtgtaatgtgaagtaaatgatctgaacttatttataaagagaagtcaacaaatacccatttcgaatttgtgggtaaactgaagctgctgggtgccctca

SEQ ID NO: 345 - DNA, 554 bp, Rattus norvegicus
aatacatcgatttgcagttttacagggaccagagagctcctcggtactaccgtattttatgttgcacgcacagacacgcacacaatgtcattagtagtttctcatctctacacttttctttaaaaaaaaaaaaaactctcatgtgacacagaaatctttcccattactttaacacagcagcaacagagaaaagagcaaggtgtggaggcttccagtgcagaatggggtccctggttgggagaccccaaagaccatcggtgtatttactttctgggagggcagaggatggtgatggagtgttgtctacagtggaaaccaaggattcaaaatgtacaggggcaaagaaacttaagaaaatggagtaaggcattctatctatggaaatctgtaagtcatttcccaaaaggattgggaagaggacccattcctaattttacagtcagaactttgggaccattgaacaccttgaagtccccagctcctacttccttacaatagggcagagctgagaactgaacgaatcttggatgccagttttcaagctgactgggttt

SEQ ID NO: 346 - DNA, 559 bp, Rattus norvegicus
agcaataattttcagtttactagatgaaacagacttggaacatagtctgcatgaatgcaaaataagccatctacagcaagtgataagaaactgggcaaaaaggaaaaaggcatacatggggggagattctctcgaaataaaaaaaaaaaatcaaaccattattataaaggactttaccaagagttgctattaccccaccccgtttgctggaagtcacaagagcatatagcactgtattcgtgtcaaatgtcagatcagagcatcctaacgcaaagccgaaaggaaatagaagagggggggtaaggggaacaaagaaaacccccaaccccactaaacggtagaacagtaactcgagttcagtttcaaaaaagagagtggcaattgaaagaggtgatgatggtggcgataatcctatgaatgggtttttgatttctctccttccgggggctgggtggagggcgctcattaggatttgtagttagaggttaaccatgtgagcccctcatagagtccgtccccggaggtggcacaggagggctgcacataccagttcctgtcc

SEQ ID NO: 347 - DNA, 636 bp, Rattus norvegicus
  misc_feature (1)..(636): n = a or c or g or t
ggaataagcttgaggccgcaatgttttttttttttttttttttttttgctgataagaattctttttatgttattcgaataaaaaatacattcatacagaaatataacaatctcgcaaaaaacaatttcaaataaaatcttgtaaaacaaaattttacaaaaatcttacaaagattctttagataacagggtgcttcaaaaaaaaaagaaataaagaaatttcactaatagaaattttttttttaaatttcaagcaaaagtttctgcttgattgaggctcagctgtcacctgaacagaatgtactcgcttattattaaaattacaggcattgacacatacggcacccagccccacccagtccaacaacatctatgtgtttcataagtgagacaagccagcacaagtcctccttctcttctgtttaccttcttacttaatggaattgttgtggataagcacacagcagggccaaaaaaaggagttttccaaaacccagcaaatcaagtgctaggattttgaattgccaaacaaaagtgcattttccccttaagcaaaacgaaaccagttccgtagagaaatgtattcgtcaggccagatacgacaaaacaacacaacaacaacaacaaganaaaaaca

SEQ ID NO: 348 - DNA, 508 bp, Rattus norvegicus
ggcaatttcagtctgacgtgaagggcagagttttctgcttccttctccagtgtctccagccatcttcttatccccttggctcggctcctggctcctggtcccacggaaggaaccaagggctgcagtgcccacagcccagctcaggtgggagcctcagcttgcagcagcagagccttgcgccctctgtggtgacttgtccagccaccctggggtggcacgtccgggaacctcgctcagtccctggggcggcacgtccgggaacctcgctcagtgagctgaagaatccaagagctgactcctcacgtatctggcaggcgaaggagggttccagaactggtggggacacagtccaccagcttccagcatcacggacagtgaggactccagcattcaccaggtgcgtgatctccgagtccctgaagccgtaagtctgtgtcatctggtcctgctggaaactaaggtccccacaggctgggagcaccgatgccaggaacttctgcaccgcccc

SEQ ID NO: 349 - DNA, 570 bp, Rattus norvegicus
aagggatataagcttgcggccgcaatgttttttttttttttttttttttgttctgaggttgtttttattgtaagaatgttgtgagctgtgccttggaaccacagttggcacctgttcatccacagcacccacaagagcaccattgagtgtatccagggctcctgggaaccctatctccagtcggtcaatatgaccgagtccgccattaagggcccagctagttggactgaaatggtccctctgcatctccaacttctctggtaggcgagaagtgagagtcaatgccccttgagcccacgttttctgggtctgggccatttgtttcctgttgctctgactgtttcagacaacagtgcttgcagaccccaacacggaaaaggggtcctccagtcactccagttatgggcttcttctctgtccacgagactccagatagccctacttagagctcctgctctcagcagaaaacagccatatcttaaggtcacaaccaaagtcactgtcttcttaggcctggaaccaggctccagtgaggaggctaggaagctgctgtaacctccatgggctgga

SEQ ID NO: 350 - DNA, 400 bp, Rattus norvegicus
ggcaggacatggtactcttttattgtgacgctcagtggaaacatctgtaaaccagcttactgtagtggtgacagctgcaacacatgctaaggcacttgtattatataaaaaaggggtgcgggtcccactcactcctgtgacagcaactgggacctgaattcagagcttttctagcatatgtagcttcatgatttgactgtttctcctttaaaaaaaaaaaaaaaaagccttcttgccatagggactctaatcacagcatttataacacagtgaggaggagcacagggaaactcagcgaccagtgtagaccattgtagggcaggctactctcttctaagcgtggctccaggggcaaggctgtgaggatccacaactagagcgcttactacaagaagggaaa

SEQ ID NO: 351 - DNA, 402 bp, Rattus norvegicus
ggacgggttactttatttcatagaaaatcacactgaggaattgaaaagtcaagtatactcagcttggattcaccgccacggactccacactggagggtgagactgccagagcctacatgcccagacacatgtgcaaaggaacgcagagacaatctgaagccacgatgtccctctgcagggactcaggccccagagtttgctcactgcatgacagggctcaggtcccccgggttcacctcagtagcatatgagcccagacaagggcagggcacaagcgactgacaccgaaagaacagtcatggtgtcacggggacagaaaggcagctggtctcagaagggaaacactggtgtctgcatgggagaacactctcggaagtcccagcttctgtcagactgctttca

SEQ ID NO: 352 - DNA, 453 bp, Rattus norvegicus
acagctagaatctatttatatgtcccaggtggggaggacagaggcagacaacagagggaaggccattcaaggtctcagcaagtcagcatcctgagtatctgagtgggctgatgcaagacgtccagatggccaggacagcagcttcaagtagaccctgcgtccatttaccagaggatgttgttcctggttctgacccattcttctcttttgcttcatctccagggcacaagagctgacaggttcagaaagcttctctagtccttcttgtccagatcagttagccggatagcgggtgttgtagactgtgtagacgctgtcccactggtcagctctgctgccacagcccagaagaggcttattcacgaggcagggtctctcagccaaaacccagagctaactgatatggatagtctcctgccgtggtgctctggaggtccttgtcttcatcttctg

SEQ ID NO: 353 - DNA, 664 bp, Rattus norvegicus
aaaagctacttaattttaatactccacaagaaaattttaaaaagacttgacgctcttgacgttgggcatggtggcatatgtctttaattccagcagttggaagaaacagaggcaggcagaactctatgaattcaaggccagcttggtatacatagtgagttgcaggacaggcaggactacatagcaagaccctgcttcaaaaaaacaagaataccagtgaagaagcattaatgcactatttgttttatggatcaattggagaacaaaatgtggagatgttggcatcaccatgaaagagcaatagtgttagcagtcgtgttcagacctccttgactaactcaggtagacagaggtgaggcgaaagatgaagcctacagatatgttggtctcagctagagagactctactgataatggccttgggcctcgacaatggattttctgaaaatgctgaggtagaaactgtttagtctgttctatctgaatggttaaaggtgtttatcattccagaaaccacttctgctgctaattatctcctcggtgcatgtgaacaagtgttaaaaggtgacttgtgtctgctgaaacatctctgtttactgaactttcatctggaaatgagaaatgcgaataagaaataagaggtaaatttaatttaagtaaattta

SEQ ID NO: 354 - DNA, 640 bp, Rattus norvegicus
aaagggcaataagcttgcggacgccacacttttttttttttttttttttttttttgtaaatgtcgtaactttattcaacatataaattttatgggtttttaattcctttccatttatcttgctgtcttggttcttcacgtgtggaggagtctttctgaggaaatctataggttcctatttttaagcatttccttgttcagagtcagaactgaaaggggcactgtattcttcaatggcgaattcatctgtctcataataatcgtagacttttactggggctggttttaagttctttactggaatgtcttgttccaccgcgaaggagaaacccatggtttgattggttagcttttcaatgtagattagaacgtggttggtgttcacttcagtcctctgaatgttagactggtcttggagctttttcacggatggcttcacaggtatgaagcctgacaccatcttcacatcaacaatgaccatgttggagttgggtcgttctccaatgtagcttacgttgatgtggatctggaactttctgtgatgttctgccttatcaaagtttaaggggagagtgttgaccttcagagtgaagggcgcttctccttctgcctccggaaggatgttgtactttagagatgtc

SEQ ID NO: 355 - DNA, 472 bp, Rattus norvegicus
agatttgagaatttattaggcacagagggtgaatggagcagagttacaaagtggctgttaggtttccttcaaactgaaaaggagccggtgtttttcctgccttggccttttaaggctgcattcgaatggccccatccagccggatgacctctccattcaagaatgggttctcgattaccatctgtaccagatgagcatattccgcggggtcacctaatcggctggggaacggtacctgtctggccaagaagttgcgcactttgtctggcacagtggtaagcaatggggtggcaaacagacctggagcaattgttaccacacgggtgcctaaaggagccagatctccagcaatgggcagtgtcatgcccactaagccccctttggatgcaaagtatgcagcttgtccaacctggccctcaaaagcagccacactgggaatgttaatgataactccacgttgacctccctggtc

SEQ ID NO: 356 - DNA, 588 bp, Rattus norvegicus
aagcagatttgatgtgagatttattattgaacatgatttgatagggtataggagagcactgtggaagccttcaggaatgcagggctctccacttgtcaagaggaccacgattggggatatatttgacaccacagccatcaggaatgagccgcttctcagcaaccatgtcttcaaattcatctgcattgaacttggtaaaaccccatttctttgagatgtggatcttctggcggccagggaacttgaacttggccctgcgcagagcctcaatcacatgttccttattctgcagcttggttcggatagacatgatgacttggccaatgtgaaccctggctactgtgccctggggcttcccaaaggcaccacgcatacctgtctggagcctgtcagccccagcacaggacaacatcttgttgatacggatgacatggaaagggtggagcctcacccggatatgaaagccatccttgccacaactctttaccatgtatttgttggcacaaatacgggcagcctccagtgcttcagaagagagttgttcatattcatctgacaccatgtggccacaaagtgggaattcatcca

SEQ ID NO: 357 - DNA, 577 bp, Rattus norvegicus
catgtatacactaaatattttaataaatgaataagggtctgaaggggaggaaaggaatggaaaggaatataaagtagaaaggaatataaagaaactgcagatagaagtcatttgaagatgattaacaggaaactgagtgaaacatgttcagaaaattatgctacaaaagttgcaagaaaaattttagagaaacattaaagaacagaaaactgagtgaataaccaggcagaactaatacagtgcaacaaacttattttcaaaatatctgatggagttgaatgaaactgaagacactcattggtgggcactgttaaatacatctcaggatacatcaccaccttctctttgccgtgctttaggtctcttactatgttgcttgtcagctgtacccagagcataaaatgttatccttggaagtaccaagagggtgtgcaatggatgggttcttccttccagatgctcttcagccgctggacccatgatgccagcatcacttttctttgttcttccgatgaaacttcaggaccaaaactgatctgtggggcaaggactttaaatccacagaagtgcaatgtac

SEQ ID NO: 358 - DNA, 290 bp, Rattus norvegicus
aatatgcctcaaagaaatttaatatatgcacaaaaatttcaagagtgaaactatatataatacaaaaacaaaagaacacaaaacagaaatgcatacaaggaaataatttatacacaaaggaaatcaaacaaagtagtttgttaagacaggaattcaatgctgttttataactgcctaatacaaaatattagcagctggcattgattagattgtgatcaaattagaatactgtatcagtgacagtgtaataaacacaactgttttgaccaacagtttataagaccttggaa

SEQ ID NO: 359 - DNA, 520 bp, Rattus norvegicus
caggtttagcatcagtctttaatgctgtcacactgcataatgacaagtcacacactttggtcttgtgttggtagtggcaacttacaatgagtcgaatggtcagagcaccaggctagctccaaagaacagatccattccctccccaggtctgactcatcacagccctggacaggcagtagttgacagggactgctttcatccaagtgcacaccagctttgcatggaattataaaaacatatttacatacgttccacggtgctcctttcatcagaagcaaaggcccttttatcaaaagggattatatctagggctgtgcaaaattcaaaaggactgtatccttttgagaaagttgagtccattacacacacacatacacacacacaaaaaaagtcacctgcacctctgagaagtgccaggtgtggccaagggctacctctggaccagcaagtactgtgactgtaaggcagccatctgatttcaagagagccacaggtccaggggatctcctggctgtccagg

SEQ ID NO: 360 - DNA, 323 bp, Rattus norvegicus
aaaagaactcaaattcaaattttaattacaaaaaatatttctgggaagctattaatactacaaaagcaagggattagaggcctaactggagcaagaccctggtgtctgcagagacacatggcggggctgtgaccttaaggtctgaaatccagagtggattgggcagtggtcacccagccccataacctctgcattgctcattccagtaggaaagggagggcagggaagcagggagaactgtagcaaagtcgggttcagctgtggctcccgcacctgcctgccaattaaagaataaaggcaagaagttgaaacaggcggcaccc

SEQ ID NO: 361 - DNA, 477 bp, Rattus norvegicus
gatacgaactattataaatatgcacaagcaaaggtcatctttttctaggagtcgtcagaatccaagttggaaggagacaccttttgtaaaaccttccatgggtccctgctttgagataaacatctaattgctgaagtctttattattattataaacgatcacagcgcatgctacttgatatggctctcaactcaagcgtctgctttcccagtgggctgtccctctccccttgcaacaccctcttcatccagccttaagaaacactgcaccatcttctggtcaacagtctggacttgtgggttgctggggagagagtatgagccaatgatagcatgcaaggtgtctattcctacaaccagacgggagggactacaggctctcaccccagcatacagacactcagctgtcatttcacctagctctcattatctatcgataatgcagcagagaggttgggggctacttctcaatggttta

SEQ ID NO: 362 - DNA, 489 bp, Rattus norvegicus
aatgaaaaagtaaatattccactttaaatttcagttacaatttcaagggggagataaattcatacactaactttatgtacagaaacaagttaaactctgaaatggggaaatagttacttttagtctcactctctcatcaatactgacgtcagacgaggagactttcagatggggtgctctgtcttcagttgtgttcgttagcatggtttcatccttagcaatctccattcatcaagatgggactgggagcaagccagcctccatgtctagacacaaacctttcgcagcttccttcctctcgcctgtctcctaggaaggagcagtccccacccgcatgattctgaagagtgtgttgatgttgttactgcgaatcgcatcccgacaagcactgatcacctggttctttggctttccaactcgcagacggcctgccctctggattgcttggttcaccgccttcaggtttcctaacagttcaatgtggatgtt

SEQ ID NO: 363 - DNA, 560 bp, Rattus norvegicus
agatcaaataatttattgtgatattgggagtaaatagatattttattaacaaaacaaaaatgatggataacagaagcaataagtgaaggtggtaatactgcccatgaccataacctcatggtcagaaacccagttctaaagaacagctgctggtgtcactttattgcattcaaccatggaaaggttggttgtgggattgaagtgactcaccgggaccctctcaccccaactggacacacctcttgctgcctcctttggtgtataggaagacaggtgggcttctccttgaggacactgaagtcacacagcaaagtagcttcttgccctcaatgcccacctcacctccagagcgctgagctccgcatgggagcagaacagcaaggatgagtgtcttgctttcaaaagctttgggcagacacaaagacaatctatctcatctcagaattgttttcctcaagaagtctcatgtatccttggctggcctcaaccctgccaggtaactgatggtgaccttgaatgcctgatcctccataacactttttcccaaggctttcacctgg

SEQ ID NO: 364 - DNA, 537 bp, Rattus norvegicus
agacaagctggaacttttatttacactaaaagcaaagaagggatacagaggaagggtttggaagccataatggggaagccaagctcttaaactcagttgcagtggggtgtgggccctgctgccggacgcaagagaataaccagaaaaagcgataaggaacagtctgcagcaggaaccgagttttcgtgctggaagaaccaggctcacagaaccaagagtcccacacaggggatgtgaccagagcatgctccaggggctgaagtccacctcaaacctgggaaagtcccagggcagcccctgagagcttttgactttggacattttgcattaattcttagccagactttgagagacaccaggccagacgaactttgctttgttgcctttatgatttgggacgaagagacttggacggaaggaagcatcattgactgtccatcccttccctgggtgcaacacctctccctgactgacagaatgttattgggctccttggggctccgctgtgggctccctggggttcactggcattgggtg

SEQ ID NO: 365 - DNA, 454 bp, Rattus norvegicus
aacctttccagtgagtttttattagtagttgcatcatgattcagggtcccagggtagggaccatcatatactgaggtcccccttttctatcggggagaaggtcaaagagcagaggagaggtgggcggagccaggtcagatcttcccaggaaatgtgccttctgctatgcggtcatcccaggctgagacccatgagacggggcagagggacttgtacactcgccggtaccactcgcacacggagacgtcaccgccctttgccgtcattgccttctcacagcggtggaagtccaggtagttctgccagcagttcttagtctggttctggtttgggaagcggctgtcaaagggggcggttttgtagttcttgattttagtcttgatgtcttcggccatcctgactcctaaagactgtcccggagcagcgttacttcaatgtgaccctttgcaaagac

SEQ ID NO: 366 - DNA, 629 bp, Rattus norvegicus
gagaaagtagtaaagatttttatttgtcaatacaagataacacaaataaattaatttttacaacaatcttagactccagggtttctctatgaggttagctcattatgtaaacagactactatctaaaatgatcgagcaattatatgagtgttcaaaaccaacagaccatatccttccccctttcctcggtaatgtgtgttacagaacagatgaggttaacttggtggaaaatggtctcagtgttatcagactacagtggcaccaagttcatgtgaacctgtacctgtcatcttcttctctaacagagctgaagtggttgtcacacctgcaatcccagcactgggaggcagagatgggtacatcttctgactgagtttcaggctagccacggctacaaagtgagacatctcaaacaaaacacacaattaaaacagcataatatccaggaactaggggtgacacgcagtggtagagcacttgcctagcatgagccctgtctgggttaatcttcagtgatggaattggagtgggaaccatttgccagtatgaaaccaacatactgaattagaggttaaagtgcgaaagagaagaggctgcactcaaagcaagcagacctgtggatctctgta

SEQ ID NO: 367 - DNA, 447 bp, Rattus norvegicus
ttgtattcataaagtgctctaaacaagatgttctttttagcagttggggaaaaaggttctctaaaaggcatttaattcttagtggaaaaataatattaacaaaagccttgtgcgaatgtttgaatgacaatttgctcattttcttcatgaattggggtttgatagaaaatgcatatgtgtcactgaaagacagagtgatgggtctgtgtggttggaactcaaaatgacattgctctgtcagtgtgtgctgtgccggcttgatggctttgatgggggaggggtacacttggctggtggtacttccaaaggtgaatcttgctatgtagggttagtggtcagggcagccattcaggctgacagaaccttggacttctgtggcttctgtgatggggacagggacatggttgacttgaatattcttcagacagccaaaaaatgagttccaca

SEQ ID NO: 368 - DNA, 465 bp, Rattus norvegicus
  misc_feature (1)..(465): n = a or c or g or t
accacaagtgacttttatttgtgacgctcccaggcgcagcccagacacagacacaacaggaagcaggaggtggccaagcagccactttggaagtcacagggcatctcccacccagctcaatccctgctacacactctgtctcagaaaacgctcaaagagtaggcccagcatgtggttcaggcatgaggggacctgcccttccctccccaggatgaagaacagggctgggccagccaaggtgcttcttccactgggtccaagagccagggtaccccaggctattccactcctgggctctttggggttggcccccggctgctcctccaagccacacagttaaggccagagtttcactttctaatgcagcccatctctgacagtctctgttccctangcacggtggacacagcaagacacagcacacagactaattccccagtgtttggtgggacacgaaggcaggac

SEQ ID NO: 369 - DNA, 594 bp, Rattus norvegicus
  misc_feature (1)..(594): n = a or c or g or t
agatgtctggacagcaaagtctttattggtaggtagtttatgaacagcttacgcttatttcatttacaaatgaaatttgggaataattaaaaaaataagttaaagactccaatctacatacacacatccattaactattttctcctaggtcttagactagaacacaaagcaataagagctgtaaccttactttgaatagtgaggaggatcataatcataacttggcctttatctgggtttaccacgaaagcagttagcaaacagtgccgcacagttatgttttagtcaaaaatgaggttcagacacaatatggtcccatacggtcctatctctttgtgacatcataagcaccttatattttttaatatttgttcaatggaactccccggggtcatacttctcaaaatccatcccaacaagtggtgcatggctgcaaatgatgatgcttggagaggaatttagctgtctactcagtctgcaaatcacaatgtggtggccttagtagttctaatgacttacgtgccaggaaagggtcccccttccccatttgcttaaaaagatctagctgtgccagtgccanaagttacttacttt

SEQ ID NO: 370 - DNA, 529 bp, Rattus norvegicus
caaggttaagcgtcttttttaaagatatgagagggtttaatagcactgtcatggtgacttcaccttagaagattaagtgtcaggggagtctgggatagcccagaacacctttccattctctcttctacttcacagtctaagtcctgtgccttaactccctgcgtggtggcttgttaaggggtgcattggtagttaaggagttgtgggttcacagttggggagaggactgatacccatcatcaactgaggtgttcaattgcaggccacagttgactttcagcttttctgttctccctaatactagagtggtagtctgagaccagaatacacagtcacctccttctccaaagatagcaaacaggctacggtaggcctgcaggtaagggtggccagaggaaattaccaatgccatggcctgtcccatgaccataattgggcccaacttcccataaggctcttctagcaaaggcttccaccactctccatgatgtagccgcaggaaagacaagtctggacagatcgatgtttc

SEQ ID NO: 371 - DNA, 716 bp, Rattus norvegicus
aaaaccttatttaataaaaggtcttaagatacagaacattcaaaagtaaataagttacatgggtacattacaatcacatccgcaagattctctttagtgtattaattttttttataaaaagcacacaaaaaataaaattttcggtctggtctatcacaactgtacacaaagaggtaatatttatatatatgtacactatttaatatgtaacagtcttttttaaaaagagtgccacaggcaacaaacacatgaaaggcagtgtctgaccattttgtttcaaaataaaaggaatatacttactttatgctattaaaatatctgtacaataattacagtcaaggctgtttctgtgctgtcctctccaacaaggcctttaatttaagagacaaatgaagaagagctctaacagctgcaaattttttttttgaggaaacaaacacagccaaatgtgggttagacacaactgttttttttataaaaatatgcatacttcctgtaaaaacctaagggtttaggctttgccagtctagtaataaataacaacccagaaaagtgagccccaataaaaacacttaaacagctgaggctggagtatgtgttgtactcttcccctccatctttaacatctggcacatgagaagaaagaggttaggtgactgaagcagttaaatataggcaatccctttagacatcatcggcacagggccctgtgccaa

SEQ ID NO: 372 - DNA, 654 bp, Rattus norvegicus
aactggggacatgtgtttattcagcagaaagggggagcccgttggtggggcagcgttaacacaggtggatggggagagctgatcaaataagagggatcagatgcttggtggaatcatggctggtggggcagccaggtgattctctggcaacaggaaagatggagcggcagacagacaggtgggacctgaaccatcaggccactgcacatcccagtcagccacgctcaccgtctgttcagttgtcaatgcattggtcggtgggaacagagaaaacgatgttgttatccttgaggcccagagacttggcaaagctgacgaatcgctccttcagttcatcggacagccccttggttcttccgtacagggtgactttgaagtactgtttgttttcagaggtcttctggaaaaataccatggcaaactggtcgtagtcagtgtcggccacttgcacatcgtagctctgtatctgagggtagctgtgaatattccccagggtgaactggccaggcctggagcttggaacgaatgttctgatccagtagcgacagccctggcccctgacgaggatggaagtgacgttgtagctattgtcttcctgtaactcatagatggtgctgtacatggtaaagcggctttgtctttctttctggaccg

SEQ ID NO: 373 - DNA, 501 bp, Rattus norvegicus
ttttttttttttattttacaaggctttaatgagacatgaaatgtaacattaattatacatcaatgaaaagaaatcctaaacgagagtttattgtaatcacacatatccattccagcttgaaaactttctgaggggcgaggggcagctattaagagccccggaccagccagcactgtgtgtgactcccatgcatcctgtgctttgtacacaagttctgtccatcagaggctgaagacatttgctgcattattacttttcagaaaaatggctttctcattcggtgatgggtgactcaaccagattcctaagaaattagttccactcagcattttaaaggataagaatgttcagccaaaaagcgatagttaagaccagcgttagccaccgagatgaagccaagactctaaaacacagacttgccaatagtgtccacctatgaggactggcatacattagtgaatagttaaggccaaggactattccaaccctcgtgccgaattc

SEQ ID NO: 374 - DNA, 361 bp, Rattus norvegicus
  misc_feature (1)..(361): n = a or c or g or t
tttttttttttttttttggtgttttcaaaattttgtttattttgggaagttctaagtatcaacagggatcttgtctttattctcctcccttcttttctggtgcctccctgaacttccctcggcgcctccctcctctttgatgtgccgtaaattgtccagatctgtcacggtctatccttccgttcagtgtcttctcacatagacttgccgagtttccatttggatttgttttttcacttgtcacctacggaggcctttttcatccaaaattgtctgatttactgtanggaagatctgttggaatgtcgtcctggttaactgttgtgcggtcccagatgcctttgcagtataaaatctctgt

SEQ ID NO: 375 - DNA, 508 bp, Rattus norvegicus
tttttttttttttttttaaagatgagcatttattcactttacaaagagaatggtattaaattgccataaacagctccatttatagacaaagaacaactgtacatcaatcgcaccagcagcttgcccaggatgcccttcccgcttcggctgtgcagcctgctctgtccctgatggaagtcctcccagggagcacttttcttagtcacaggtgggaaagcctcgcatctgctcagtccttctgcagacgacagctctccatctgcacccctgactgaacgagttagtactggcccactctttagaaacaagacaaattactggtaatttgaaaaagctgtgtagcacaccaaaatacttatttatacatacataaaaaatcttgagtaagatttatcattttgaaagataaacagataccctagccctgctaagagcgggtaatgaaaaggaaccaaaatgttaaattactgaattataaaaatagtctctttggaaaaaaattccagca

SEQ ID NO: 376 - DNA, 149 bp, Rattus norvegicus
cactacacacaattttaatgtgaaagtaaatacaacatacagatgtacagtaaagctgatagcaaagcaatctggtagcttaaggcaagttttaatggagattagtttagaaaataatgatgcaatgacgtcatcgtaaatatggatta

SEQ ID NO: 377 - DNA, 222 bp, Rattus norvegicus
tttttttttttttttttgcttttttgtttttcagagcccagcaaacacaactttattcagccttcagagacctgcgtttggccttagctcgcccccaacagccagcccccaacagccagcgctgtttgctaagtctgattgctaaggtattttaccagtcactaagtcacagcgtgcctccagagcgcaagcctttcctgtgcaagtgaagtctgggggtgg

SEQ ID NO: 378 - DNA, 220 bp, Rattus norvegicus
tttttttttttttttttcaaattaacttttatttgaaattactcttccccacatgtattatttaggatcctatacaataacccatgtaaccaatgtcccaataccaaaatttctaacagcaagttatacaattgttctaggtaataaataaaggttgtccttcagtgattaagggaataaagtttccgtaaacttaacataaaaatcacactttaagttt

SEQ ID NO: 379 - DNA, 505 bp, Rattus norvegicus
tttttttttttttttttcgtgttctctcaaatcatttattcagttcataatggcgcatttgaacaggatcagcaatcttggcagacaaaacacatatacccactgaccccaggtaagccagccccccaagggtttgttggtcccggggacttcctctctgaggtgaccaagtgaagccccgtaccattggcactggcattctctttggtgtgtgacctaaaggctgagggaggaaagccagcaggaaactgaatatgtggcaggtgccttccctcacagtgaggggcttggcttgtaaaatagagcaggccacaagaagagacctctcagctaaaggtcccggaagtagatttggacatcattttaagacagaatggtcattttcaaaggggtagaacttgatgtcccacataactttggtaaaatgactgtttgactgtacattttttcctgttttttgtttttgtttttgtttttttaagacagggtttctctcctcgtgccg

SEQ ID NO: 380 - DNA, 495 bp, Rattus norvegicus
tttttttttttttttttactagaaatcatccagtcatttatttttgtttataccagagatataatgaacatattaaaaagaaaaaatgtttttataccaacatgtttttattgtttgtttctagactcctccatttagaaaataggaaccacggtttcattaagctgtggctccttttcctttaacctaagcttagtttaaggaaaacttccctcgtacaattatgtaactaactttaatcaatacatagtaattatgcaagcctcaatacagtagctaactttttgaaaatgacttaacacaaactattaacaactaccttctttgaaaatttctctatgcaagtatcagaacagatttacttctcttttaattttcatttcctattttttgggtatgccttagaaaagtaaaattacatataaacattgtcaactactttatttgtaaagtcaagataatggattatctcctctaagtaattaaattttgcaa

SEQ ID NO: 381 - DNA, 474 bp, Rattus norvegicus
tttttttttttttttttcacttgacgacgtggtccttttatttgaactgaaaggcgtcatgacaaagtgcaaacacctctttggtaatgggctggatacaagaaacataaaatggcatttggctgttggcaacagtcagaaaagtaaataaatatgtacactactttgaatcacagaagcccagtgcagtggctagtcagaaagggtgtctgggtactgcccacagcttgcaatgaggctgtaacatcaaaatggagatctgcagacatcttggtttgaaatacagaagttaatgtaaatcacagccagcttctcacacaggagcagaggacaaaaacccttggcacctgtctaagctccatgtacacactgcgtgccttagcacaagacatacccctggtgctcttgtgaaataccagatatccagggcaggctctcccaccattctatgcctgagtgattacatggccatca

SEQ ID NO: 382 - DNA, 501 bp, Rattus norvegicus
tttttttttttttttttgcatttataaaaactgcagatttattcagcgagggcccgtgtccaagaagctatggtgtagaagtcggaggacctatttttcctcttctcctccccctcacttcgtcttcctggagggcaaaaatggtctggaccctgaaatcctaacccaaataaaaaaaaccacaaaactgaggttccaaaaaagttaaagaatcttaattccttatagaaaagagagaggagccaaggcaaatggggaggtatcccaggggtgggggaaatgccccctacttggtgggatacccctcctcttacatagctgcctctgatgggacaaagcttggggtatagcatttaaaaactcccacaccccattttatcaaaaccaaagagaacaaaaaatttcccttccccccacaaaacccaaatatatatatatactttttcttaaaaaaaaaaattccaaggcattaaagcgttaaagtgaatccagaacaagaga

SEQ ID NO: 383 - DNA, 406 bp, Rattus norvegicus
tttttttttttttttttagcccttgacatttatttcatggttacaggagttaaaggtgcaccctaattcatcatgtagcagtagattccccaatatttatttcatcatgatctgagttcaggagtaccgccctgagatgaccctagtgcagaacagaaaccagaaaggggaaggtctgtccactgcccttgcctccccagtcttgacctctttaatcaggaaaagcttcattgaggcacccagaccctaaggataagaatcaacaaaacgcacaaactgtggatccaagccacagtcttgatgctttgtccttccagagtgaggaaagcagtgtgcaggtctgctttttggcatggctcctcggagcagcccttctagctctgctaagaacactgttcctgtctca

SEQ ID NO: 384 - DNA, 439 bp, Rattus norvegicus
tttttttttttttttttggagtttgatgtttatttttagcaggaagaatatgctaacggtgatggcatcaacagaagatacgccgtgtccaatatctgcaatagaagctcaacagaagttaaagaaactgtaccaaaaggctgaagacaaacactgctgacatactcaccctgagtgctgcaaacagtgaaaaagcaatgatgcgttaagactgaagaccactacgacatcacaaacaggtaagtcaactatgaaattcatgttctaagaaactctattgtatcttctccatttcaagtgggcaacctcttccaggacagagcatagcaacaataactgaagaacaagtttatgtgaacagaaagggagcaaatggaaaaaggacagtgcaaaattaggagttgagcatttggagtggaataatcacacagctctctca

SEQ ID NO: 385 - DNA, 507 bp, Rattus norvegicus
tttttttttttttttttaaagcaaaatttgtaacacctatttattttgttgaggagctttgccaataagaacatttaaaacatttaaaattttcaaacttgaactttccttagaatagttatatagattgtcaccaacctgttcttttttttttttttggttctttttttcggagctggggaccgaacccagggccttgcgcttcctaggcaagcgctctaccactgagctaaatccccaacccatcaccaacctgttcttaaacaagaaagcccataaaacactgagaagtgtataactggatagaatgtcagggagaccattgcacttcagtgccaggggaagaaagactaaacgattagcacaaaggtctcatttcagtgaacgaagaagcagctggaagagaaagagcatacggtcagtgcagaagtggtaagcattaggtgggactgctggtgtcagtaatgcagactgaatcttctcgccctgctttcacatctcaagctg

SEQ ID NO: 386 - DNA, 359 bp, Rattus norvegicus
tttttttttttttttttctaggaaagaaagcggtttattttcctaccaagcaaaacaaaatgaacagggtcaatcagaaaaatgtcaaaggaaaatcacaatgaaataaaatacagaaacacagagaagtaaacttccgcctgatgaagccggagtacaaacagcaaaactaacacacacgagagcctttcttgctagtgtcctttgatttatacatcatcacttctgtttataggaagtaagagagtcctgttctaggtgaacctcacaccacagctcgcttagctctccaggtccaacataacaaacctcggggctggctctctcaggccataaataaaaagcccagccaactctgg

SEQ ID NO: 387 - DNA, 226 bp, Rattus norvegicus
tttttttttttttttttgagcatcagaggaatggctttattgtcttctttcttcctcagtttcacagagccaagtcaaagccctcatggggaaaacaaagccatatggggcacagccattctgaaaccaacccacagttcatacaccaaggaaaaaaaacccaacagaaatccaacaaccacccaagcatcatcctaccccaagctggaccgggttctgggctaag

SEQ ID NO: 388 - DNA, 297 bp, Rattus norvegicus
ttttttttttttttttgccgggcaacacgttggttttaatggcattgacatccaggcagtcacatgtcagttctgcttggcaacttccaagggtgaggggctgcacagtgcgagggaacaggctccggtgggatggaggcgggcggcgtggcagactctttcctttccagtgcctgcgtgctcttcaccctgggcatgttctccactggcctgtgagagtgcggatgaactgggctggggcaggaccaggaagtcaagaaaggaaagtggtcaagagacgtggctacaatttctggc

SEQ ID NO: 389 - DNA, 542 bp, Rattus norvegicus
tttttttttttttttttccaattatgtaagtattttatttatcaccaaagaaataaaacacagcagcaagttctgtgttggcttcaataagaccaaatggttactttttttttttttaaaacacagctacacactccaaaattgaagtcaacacagtcatcactacaaattacttgttgaaataatctatcctgaagaaaattaggaaaaagaatttaaacaattcctccaaaccacacatttataaatattgtcatatttaaaatgcttgaaaggcatgaattagtggaaaagcagttttcttttggcaacagaaaaaaagaaacccacaacagtttaccaaatgctctagggacccaaagctgtactgttctggacctgcacttgagcagcatcgtcatgatgatgactaaaaaatgcttttatactcacctctctcaagtaagtctatagaaaaccccattacagccagtgtttgtaatgtctaccacactgatcagaagctataaactgcctaaatatatttaacagtaaatacctaa

SEQ ID NO: 390 - DNA, 385 bp, Rattus norvegicus
tttttttttttttttttgccttttcaatctgctttattaggttcacaatatgtcatatggaccttcccatgcatctgataaaagaattacaggccgagtaaaaaacacaagtttcacttagaagttggtaacaggaagagatctacataaaaggagtaacctcaaaacttgtacatcacaaagcaggggtccccatagcatcttcagagacaacctcaggactcagggcataaggcaaaactcatcattgtggtcatggtgaggggggtcagtgctcaccgcccgcagactatggctcagctgcctttccctcaacttgcccatgaggtgtctcatatcctccccaaacctttgcacattctcatctctcatcctgccctgggcc

SEQ ID NO: 391 - DNA, 344 bp, Rattus norvegicus
tttttttttttttttttgtttgtcagtatctttattcacaaatcagtgtaacagtggcactcagttgcagtgttccatgggtcagagatcgtgacaagaatacgtacaacagaaaagttatttacacagagaagccattcgatatgcagccttgggtagtagccccagctctccccattgattctcctagtttggggtttgggttgggtagtttcttgggtcttctatctgtgaacgacggtgtaacagattccacagaaaccagacttctgaggataagcagcagcagtgggagaaaggacagcagattcaccactgtgcctatgcttgacttctgtgtgtcc

SEQ ID NO: 392 - DNA, 155 bp, Rattus norvegicus
tttttttttctttgctagatcatatggtgcttttattgatgcctgacaattgggcaagtccctttctgacaacagagcactatgttgaatcctgcctgcaagaaaagctgctccaattcacttaaggagctggatggcagtgctcaagggggcca

SEQ ID NO: 393 - DNA, 430 bp, Rattus norvegicus
tttttttttttttttttaaagttaaagattcttttattaataagtctccctcccctccaaactttatccccaaaataaatatcacccccttgggggatgggttgtgtttgtgtgtactgggaccagccctcccagagggccagcccccttagtgttatgaacaggtccctcaatctaacccactcccagggctaaaactcagggtagtggcatttcagtccatccgagtgggtggaacccagtgttgtgtctgcccctcaagtcggccaggcctccaggacttgtggggagcaagagattcccttgtgcaaatgctgcagatccttagtatgagtcgctttgtgacctagcttgaggctctctgtctgccccagaaccagagacagggcaattagacaccctggaaggctcccctgaaccctaagcccag

SEQ ID NO: 394 - DNA, 441 bp, Rattus norvegicus
tttttttttttttttttcaagcctggggaggagactggggaagtcttgtgccctccccagagatgctttattgcgtggcttcaccagtcatcagtgaggagaccctgggcccattcgagatgatgggaacacccgcgcagtacccggcagatggacccagatgctgtgcagtcagatgggacagggtgaggagtggtactcggcctctctgttccagggcagacctgggatcccagcaggcagcaagtaagtctggcaaactgggaggaggcagtgttcaggcctcagtgacctccatgttctgcagctggttctccagggtgacctcttttgctttctttttgctgccttcatgttgcttcttctgcttcttagatggctcctggtcaataggtgctggcttcacaaatgggatcagttcttgcctcgtgccgaattctt

SEQ ID NO: 395 - DNA, 557 bp, Rattus norvegicus
  misc_feature (1)..(557): n = a or c or g or t
tttttttttttttttttgtcataatacttttttttattacaatattcaaaaaactgggtatgcaagtttaggggatcccaagaccccttcttcaattgtaggaatgtgccatctcaagactctatagtcaaactgtaaagaagttcagatgtaaagaaaaatgaaaatgtaatttcttcataaacgttctgttactactaatcacatattctcttgtaaaccctgaaaaatttccctgtaaagcaaataatatatatataatatacacatattatatatatatagtgtgtgtataaagtattggtagctccccttcccaagagatcagctgttttccttaatcatctcttattagtgtcgacaaacagctaagatacatattactttgagaattaaatacataattgtgaaattcaaacaagccaaagggcaaaagcactatgtggatggcacacctgnggtacatcaccagagtatctttctttctgcgttgccacctccctcttttgcagactgactctcaccaaaaccctcttttattgcaagcacagcctcca

SEQ ID NO: 396 - DNA, 337 bp, Rattus norvegicus
tttttttttttttttttcacgttctgctcattctgtcgttttattatccaattgtccgttacagtcccagtcgctttacagaaccaaccgtttccaccgctgacactattgtaaaccacatcggcgagttatacagaaagctctgcgtttcaaaaaactagacgctttagtaacaatattacaaaggctttagcttcaaaaataaccgaaaatgaaaaaaataaacttttaaagaattagcatcataaaattaatttattccaagtaaaaatacaaaataatattatgacgttgaccagatatgaaagtccctcccagaaacaactctagtaatgat

SEQ ID NO: 397 - DNA, 557 bp, Rattus norvegicus
tttttttttttttttttaaaaatgctgttctaattttatttatatgtttggttattaaataaaaacaaaacctataattacagtcccagggcttagccagaccaaatcagcagttctttggtaatgtttggcatgtaataggactgtcatgttgatgaacatgattttgatcaggaaactattaaaggttgactttcattagaaaacaactagagattattttaattagaaactatcttaggctgaagtcttcagaactcttggctagagttaaagaatataaacaaaaacatttcatttttcctgataataaacgaagttacttggcattttttcccagttacacaaactccattaatacatgagctaacagaatgtaaagagtattctgcaataatcttctaagataactttagtataagttatgagaataaattaagtcaattgcagtcgttctttgacagcaaaaacaaagaaaaccaaatgatatacagaaagtatttcccaccgagtaagttgaagtgtttacacatttgttactaaactaagtaccgatt

SEQ ID NO: 398 - DNA, 345 bp, Rattus norvegicus
  misc_feature (1)..(345): n = a or c or g or t
tttttttttttttttttggattttgactcctgattttattattcaatttctttttctactaaaagtagtcttcggtggttgggaagcctggcctcccaacaccagagtcagtcggagctggtttttttgttgaaaggagtgggcgggtgggtgggggaccgggatgagggcagaaccccgctctgctggtagtcttgggtggagaagacgaactgcacttgacagagcctggggtgcggtgggagggggtgaggcangagtgacaagctggggaggggacccacctcagtcnccagctccattctcctctaatgtctctccactggtggcgttctctgcagtctt

SEQ ID NO: 399 - DNA, 242 bp, Rattus norvegicus
tttttttttttttttttgcactatacgttttatttataagactagaacagtcgagagtgttcgtttaaattaactaatagaaaggggagaatggcatatgagccgctatttacagaagacaaactgaactagaggagatcagcttttgttacaaaacaggaatcacgacattcacagacgattgttttataaacattgatggaaatgttttatacttgcatactttcttccttggggaaaaa

SEQ ID NO: 400 - DNA, 470 bp, Rattus norvegicus
tttttttttttttttttaactggaagaagcactttatatttacagttcaactgataatgccaacatttgttactgtacaggtatcacaggttttgtggttgcaaagttatgtattgaagtttactggtattactacccacctaaatctaaactaaatctattgctcccatctgcaatttagcttgtaaattaaagtgttctaaacatgagtcaattatgaatattaaaagggaaagtgagacaaaagtattcccaactagattatctacattaatatgttggaattctatattttgctgtcatttttgtctttaaaaaatgaaataacaacgctctatcagtcacacagaggacatgcagatttagcagtattgatattatactctgtttggaaatagacaccctgtacccacatgtacaccaacagcaggccacacattaacagttgtaactaagcactgtgacaaatt

SEQ ID NO: 401 - DNA, 397 bp, Rattus norvegicus
tttttttttttttttttaactttattcagttttaatttctgaaaaaaaaagagtttaaagtacttaagataaagatgttctatatcattctagagagcctaggaaaatccaatgggtggaaactagaagattgatgtgggtttaggataaggatggtggtagttgttagttctgagacatagtcttctgtagttcactcagtctgtcctgaaaactaccctaaccaaggatggtcttgaaatcctgacctccttcctcttcctcccaagtgccgatattacaggcatgtacaaccacacctagcttaggaggaactttttaaattaattggcagctgtaaagatggcttaatggtttagagcactttctgctcttccgtggggcgtgagttccagtc

SEQ ID NO: 402 - DNA, 220 bp, Rattus norvegicus
tttttttttttttttttaaacaatcagtactatttaattggatgtctgtgccatgatggttacaaactatactctctgctctgaggaatcaaaaccaaaccagaataaagatgaacaaacatccccaaccccaatcccaagagagcagcaagaaggaatgcaggagtcttacagagcacactgattccaagggcatagcatggcattccggatttggagg

SEQ ID NO: 403 - DNA, 531 bp, Rattus norvegicus
tttttttttttttttttaaataagtaagtttccgggttctcatattttctttttctttgaatatattgcacaacattttattattagaaaaggctttatgtctcaggcaaaaagtttttctccacccacgaggtgctaatgtgtgttgttctctagaagaggtaagtggttgtctgtgtggccatccgcaaaggggacagaatggacgggcttgtaggatccaagtctgaaacgacagcaaattatttccactataaattttccaattccatgtaacatgcctgttgttgaaaagattcctccaataataccacagagtcttacaaaaaactgccagaaaggcatgtgttcctcagtgactgtcaccatgtgagaactgagatcgtatttcataaatattccagagacgccgtggctgcctgcagcatggttgatgatgcgttccctttctgtcacagagaactgatgggtatctgcggaaatcttgtatgtgtgtagctttgttggcacaactgtaatgaaatattggaa

SEQ ID NO: 404 - DNA, 474 bp, Rattus norvegicus
ttttttttttttttcttcccaaaaatattttatttattaaacaatatatccataatccatgatccaaaaatacagatatacatctttacattatttaataaaaagatttacaatagtatctctcctttacaaaggggaaataggtaataattccttgaagataaaatgtggcattcacgttaaagctggatcatccaatggatggagtgtggccaagagcgaacgccaccgcacattctgagggaaaagacacttcttagacctcccctactttaaagctcctctgggcacaggtagtggagaccaatctctgtccaaggaaacaaggtttcaaaacctcaaatgctcctgtttgatttcaaatgctgaagacctacctaacctcctggcataacagggccaaccttggcaccgtgatcacgtggacgagttgctctctgggtggtggtattgcttgaagcatccctgccaagg

SEQ ID NO: 405 - DNA, 437 bp, Rattus norvegicus
  misc_feature (1)..(437): n = a or c or g or t
tttttttttttttttttagttttgtaaacagctaattttattccttgataccaattggttgttcatgatacatacttttctgcaagaaggcaatgaatgaaataaaggcatagaggggaaattggggaaaaaccacaatgtagtaggatgtcacttaattaaactcgtacttgattggctagttgttttagttacaatttcaagtcttatagatacagaattctactttttttccagaacaaacatatatgtccttaaagacagtgggggagacaacagatttttaactgctgagcttcttacttctaaggagaacagtcaacattgttacttcttgtccttcacagtctggaattcatgtgggtcattagcttctccaatttgattgctanggctatgtttcctttaatcttcaactttcctgacataaatgccat

SEQ ID NO: 406 - DNA, 486 bp, Rattus norvegicus
tttttttttttaaagacaaaacaaatgcattaacacacatccaaatgccacagcaagcactcattaggttttataaaagagaaaactgcattgtggtgtcaaatgaaaaccaaaaccattttaagaaccactacagcttatggtgacatggatacatggacaactaagaagccagtgcatgttttcagctctgtggaaatgcatgagtaaggtgaagtcatggaaggtggagtggccacagtcacaccttcagacccttttccccactttatgttcttcttctgacttagtcagcaggtaaatgtacaaagaacttaatatcaaagaacacttccaaaagtcaaaaatagattcaaggtcatggctaaagttatcccagaggttaggggaggggggctctccaaagccatatgtcacaaaatgccaggcactaaatctagtcacatgtgcttgcagtaaaaaaaggaacactgatccctcgtgccg

SEQ ID NO: 407 - DNA, 395 bp, Rattus norvegicus
ttttttttgttttttataacaatgttttattcatttattatcatttatttttatcttgtgtgtgtgtgtatgcatgcatgtgtatgtatgcaagaggggcgtgtgttcacatttgcaaatgcaggtacacatatctggtatgtgcagttcagaggagcaccttgtgcagcagcccttgttttccaccatggctgtggcaggatctcttgtctctggctgtgtgcaccaagtgagctggctcaggggcttttgggaatttttcaggctctgcctccggtttcttggcatgggttctgagaatcctaacacaggtcttcacacagcccagagttggggtgattctgggaagtcggctgctgtgccggtgatcggtgatcgtctccaagttcgtggag

SEQ ID NO: 408 - DNA, 310 bp, Rattus norvegicus
tttttttttccttttttagtttacaaaatgaattacggtcacttttaaacatcatgaaagaagaaatggatgtacacaccttgacacttttctagcattcttgaactaattcacaaatgcgagaaaataaaaaagaaaaacgggagaaatgaggaacataggtagttcggtgttaaaaaacatttgcaggaatgatgtgtattgttacagagagaagggacgcttccccttcctgttttgcgtgctatgagggtcatttttaaaacttttttttattataaacactattaaattcagaccgcttttttgg

SEQ ID NO: 409 - DNA, 289 bp, Rattus norvegicus
tttttttttttttttttccgttttgtcacctgatatttaatgatgtcaacagacagcagggcggttttcacaaaagtgtttgtgacatacttagtgcttcagactttctgagcaacttggcactaataaatctggcacactcattgccagcaatggatgtgtcaccgggaaaccaggtttgtgggtcagcatggcttagtggatgaggatgtacatgccttcgacgttgattatcactggccatgactacttgacggattgttgttgcaatcccagtgagaatacacag

SEQ ID NO: 410 - DNA, 375 bp, Rattus norvegicus
tttttttttttttttttaaaataaaccaaaaggaatttatttacaaaatgtcttatttcaacaacagttacagccaagaaacaaggtatcaagcaataatgaacgaagagactccactaatcgtgtttaagctattatgcccagagtagcttctcttgctagctagaaagatgtccctctgagtcctccacttgcacaatggcatcatttaaccaatgggggctgtgtgagcagcacagacatgtgtgggttcagctgagtcacaggtttcttgactttttctcctcccttgtttagttttttacttttctccttctctgttgactccttcctctttttctcctccactatcagctcctttctcagcttcctctt

SEQ ID NO: 411 - DNA, 498 bp, Rattus norvegicus
  misc_feature (1)..(498): n = a or c or g or t
tttttttttttttttttcgaaagccacctctttatttcgcattcctgccgcgtgaccagtttgcatgagctgggaatgagagggttgtggagggaaaggcagagtgtctgggggcagactctcctggaaatagtagatgcacactgctcaggcaggttagactggagaagcaatttcacgataaaccctacagaatgagaaatgtacaaagttgttgggtggctgctggcctcttgcctccccatgggggtcagggttacacccatcagtcctgcacaaaggtcctgnagttgacctgnggagctgcaaaatcttccctgngggacaagaacagtcttgctcacccagcagatgtgccaacgaataggcacatgggtgtgtgcccagttgctgtggtttccccctcaggttccatagctcctcaggtgtgtcttcctcctgcctctatgtcctccccttaaaggtgttcatacaggtgtaagtccccgagaacctgtg

SEQ ID NO: 412 - DNA, 258 bp, Rattus norvegicus
  misc_feature (1)..(258): n = a or c or g or t
tttttttttttttttttgctttttaaaaagagataagactcttccagaagcttttccgtgcaacttcaaggtctanaaggtgtgtctgatggggtgcagccagcttggaaacacagccggtagatgtgatgacacagcaggaattgaagcctcttctccagctggagagcgtgagttccgactctatcccacgcgctcagctctcggcaggaactgccacactggacatcactggcagtaaaaggtgagcacgttctc

SEQ ID NO: 413 - DNA, 258 bp, Rattus norvegicus
tttttttttttttttttaaggcttagttcatttattacagcacaaatatctcagaacacactgtatcagaaaagacctggcagtaaatctaagacaaacagtttccactttccaagtttgcagtcggtcaagcaggacatagatgcggagcccttttcaaatgacacagttattctgaaagtttaaggtgctacaggaacatacaaccaaggacttcattgtggagaggagaccagattcaaatctgccttcccggtt

SEQ ID NO: 414 - DNA, 516 bp, Rattus norvegicus
tttttttttttttgtttgttaatactttattagtattttctaacagacagaacataacacaaaccaaataaaaattttaattctgtagttaataaaaataactgacattctgattctttccccttggttaaagaaggagagcattgatagagcggttaggcacaattgacacttatgtacaatgatatgcacaaggtaattttttaacaattaaaatcctaaaatgtgctctttagttttcccttataatacaggagccaggctcccataagcgaaactttctactaagaaaagaattttacaaggagtgacaaaaagacttttaaacaagtccttaattaaggtgcggcaacaacggaatgaagttgttgggctaagaagacagttaaattagatctcaaacattaaaaatgtagttattttacagttactcaaataaacatgcattaaatgaaaatattgcacaaaattaaaactgcagattgtgaaatttatgttgttcttaatttatttttt

SEQ ID NO: 415 - DNA, 513 bp, Rattus norvegicus
tttttttttttttttttgaagatggaaattttggttttatttgaactgactgtagtagataataacacaaactatatgcgttttttcaaaatcagcagcctaggcacatcagcgatgacgtaacctttgaggaaaagaggagcctccacccacttcatctcaggggagcgtctacttctagtgcaaagtatgtgaggctccagccttctatgcccgtgcatcttgctacaccttagccaagctcctagttaaccacgaaagcaggaaaattgaaattattctgggtttttgggtcttacaatttaaatcacaacatctctaaaaagataggtcaactctaatgcttctaaagtgattttttctttctttcttttttttcggagctggggaccgaacccagggccttgtgcttcctaggcaagcgctctaccactgagctaaatccccaacccctttttttttttgcttttttaaggtttgtttttaaccgttgtgtatgtgtacgtgtggagg

SEQ ID NO: 416 - DNA, 396 bp, Rattus norvegicus
  misc_feature (1)..(396): n = a or c or g or t
tttttttttttttttttaatggggcaacatttttatttctgtacattgacatacaaattttccccaaaggtacaacagatgcgacaccatgcagacacgcagctgtgaatgacagttcagagctcaacataaacttgtgctgtgaacaggtaccgcccccgtcgacacatacagtcacgcggctcttaagaggaaaagcacacatggttgggttgcagaaaggacagaggtanggaagcgttcctcactagacacaacacaccatattgtttttccaaaacacacacgatacattagagtgaggtggtgtccttcagaacagggaggagttgaagtgtgggcctccctcaacccatgtgccacccaagggctgggtgtgtgatggtcacgagattc

SEQ ID NO: 417 - DNA, 357 bp, Rattus norvegicus
tttttttttttttttttcccttttcaaggtcactggcctttttcctcaattgtaaatagttagtgtttattttaaaggtggtggagggagggtggggacataaatttgttgcatgagagtgtcaggttttctgtataagcatgcatcctctgacaggacattttgttgaaaataagcaccttgataaccaaaaccccttcaaaatagcaacaaagctttagttctgtattgatgaagtcacataaaagcctggctttatttttgtaggacttcatagctgagagtagaacatagcattggggctactgttggggtaatgcaaactaaataaacattcaactcttcaacctcgtgccg

SEQ ID NO: 418 - DNA, 284 bp, Rattus norvegicus
tttttttttttttttttaatttccaaaaagctttatgtgaaatattctagaagccctttacaagccaaagcattataattcaataaaaacataattttatagatatatttctctatacaaaaggctgatcgttacaaaaattagaataaataattggaaaatgagtgccactgatttaaaaaagatatctctgattgcttcatggtgaaatgccttctatgtcaccaaaagatgagggcgcggacagctgctccgagcccgggctgtgagtcccctgcgaagat

SEQ ID NO: 419 - DNA, 309 bp, Rattus norvegicus
tttttttttttttttttagaagggttgaacatcaatttttaataatgaaacttttatccagtcctcaaaattaacataaaaggcatgagaaattgaccacttctcatccccaccacggtgtaacaatcctttgttacaacatccatctactgtctccaaaaagcccaatacaaaacccacacattataccacctaatgttctaccaacagatgagagtttaacccacgttataccaggaagctattaccacggatacttcaaatcacatagctgaaaacatggagaaagggcaaggtaaaaaaatcatc

SEQ ID NO: 420 - DNA, 483 bp, Rattus norvegicus
tttttttttttttttttacaaaaaaatcctcaaaattctttattctgacaagatgaggaagttggcatcagtgagtcgtgtgccttccatgagcatcacagcccacaggcacgctgcagaaaaagcagcgattccaacagtccccggcaacggctcccagtgtccaggtgcctgctgcaggttaggcggcctgctgttcccagcgtccggtggagcctgggctactggtcctccagcgccgagctcttggcttccacatactccaaggccttcgccttgacagcctgcacgtccttttcggtgccatgctgcttctcgtagtccaggtagcgcttgaagaagaacttcatcctcttgggggccaggctcagatgaatgacccgctcaaagatgtccctgacttctttctggctgccgtgcttgatggtcatgtcgatgtagactgaccagacatctgtgcgttttgggtaggtggtcagtgtg

SEQ ID NO: 421 - DNA, 382 bp, Rattus norvegicus
tttttttttttttttttggcagtgaatttcacagagctttattgggtaggacagagggccacatttctacctgtttacccaccaaacatttaaactgctattgctctgagagatccctggtgatcttcatgatctccattggagcttgaagagagtatgatcaggaaagctcaaagcttccttccttaagcacaggcaatattatttacagttcaccttcacactggagatgaaaatcatactggaatctatcactaaaccaaatttacttttccttcttaaatgtctttgctacacagtttcacttttctggtgacttcttgttcttaatatcttggtgtatacaatgtcttcatccttcttcagagtttttgcatctttc

SEQ ID NO: 422 - DNA, 410 bp, Rattus norvegicus
tttttttttttttttataatacaaagaaaatatttttatttgtgtatcaaagactctaaggttaacagttgatgtcaagacacaaaaaggtttgaaaagctaaagctaatcaacctcccttgattatgttagagcgtctgatatgctcccaactgaatcttaagcatgatgtgttcaggtgacaggattacggttcctttacattagtcttcagcatctttcttttttttctttttcttctttttctctggactaggaactgctgtgctggtgcatggctcctcctcggaaagtggctctcataagttcattaacaacaggactatggatacagctgagattcaatttttcctttatgacccctcctagcttagcatcagctacagccagaggttcatgcctcgtgccga

SEQ ID NO: 423 - DNA, 428 bp, Rattus norvegicus
tttttttttttttttttacatggggaatctgtttattggggagacagggttagtcaaagggtgggctagctagggtagggtagggtagcaatttgtctggccctcgggaaacccaacttgaatccaaggcctcatctgcttcaaagccaaagtcttcctcgaccttaatctgcactggggccagttctggagtcaatgaagatgctgctcgtggtgcccgccgcctcttccgcccactgggcccctcgccaggggctgggctgctggggtctagggttgcagttgtcctttgtggtggggaaagtccctctttctctggaggttcattctcaacattgcctggggtagggacatcagtgccttggctgccatcatccttcaacacaatggtgaactggctatcccggtagtcatccccgtatgagtcc

SEQ ID NO: 424 - DNA, 447 bp, Rattus norvegicus
tttttttttttttttttcaaatatataacaaatatctttattttgagatacagggtacttgtttatgaattataagacctatatacaatgagtcacacctccacaatcaagtatctttatatgctttttaaatgcaatgaccttattcagacttttctgaattgaccatgtcagtttttaaaattctctaaaataatgccattttatgataaaatacatttttgcaaaaattcagaaatgtagtaacatttaatgaatatgaccacgaaaagtatctgtaagcatgtgccaatgacttagcacttttttccagtttttatagttaaaaaaattgtaatttgacactaagcctgttttaaaaatattgttatactgattcatctcaaaaggcactattaatagtccttttgtaaaataccatcatatataactgtgaatgttttgccc

SEQ ID NO: 425 - DNA, 507 bp, Rattus norvegicus
tttttttttttttttttcagcacagacgcattcacgcctttattacattttcttagcattccaagtcacaaataaggtctctgacaacaggcaaacctgtatttaaactcatagcgtcttcttctttaaataactgttactgtagggttgtgatttaatcacggttgtaaaaattgtgcaggtatctttaaaaaaattgcttctgtctttggtctccaagtgtccatctcagaacattaagtgacaggagccaacatagactgctaaataaaagaaaaatctaacatgacacaaatattttttaaaaaagacatcacgtgatttcctcgtagctgttaattcttaataacatacgaaggcagatagggagaacaggtccatcgaagttttattggaaaccttgatttcaagtaagattgcatgacactgtcggttaaaaatgtagtccagtcctaccagcaaactaactcactttccttgtttgctcaagcctccaggcaccggtca

SEQ ID NO: 426 - DNA, 484 bp, Rattus norvegicus
  misc_feature (1)..(484): n = a or c or g or t
cggccgcaaaggtttattcttattatcttgacagttggcagcaccaatgttaacaaaccaattaaaaattagccaaaatctaagatagacacatgtacaaaagatatacaaattaaaaccattttaaaagtaatggataacataatttgtctgtggctataccatctacattcagaaatgattgtgaaattaaaaccaaagataaaaactgtacagcatgaactctgagcgatttccatttcagtctttcactctcacacatttagtgtctctggtgggttgagaagagaaacactgtgatatctgttaagcagaggaaataaaaacctattagtaaacattcatcggggagatcacagaacanacaatttatgcgtcccaagactggagaaatgctacttttatttgattagactaatgagtttaaaaacatttgatacttaggacacatatctgttcccttaaccatctcttaccagatgca

SEQ ID NO: 427 - DNA, 617 bp, Rattus norvegicus
tttttttttttttttttgtgatttttgttgggcctctttatttagaacctggcggacgaggagccctgggcagttggtatgggcagtacaggaaccatttttcgacagtctggtcaccaagtttaagagcaatctaataatgtggaggacactgtcagctaactgaagatgaatgtgtgggggcttttactcaacaaccattcctctagagtctaatacaaaagtagatttacatttgtgggtaatctgaagctggtgatttctagtgcctttggtaataatcaataagccagcagttgcgcggcagagggatccacgcatggataaatacaaacattaaattagcataatttttaactttttgttcaaatatacatgtttttcccttttctcggccttttccctcggtccacattttccaatttccccccccttttttctttttatctttttgcactgagagcgagtagagattaaacattttacataaatgatttaaagctttacaccttgggaccagcgtactccttgcacatggtacagagtgttctcaatacattgcacagttttcagatttccacaaaaccgtgggctgctctgcgcaaccatctccggtt

SEQ ID NO: 428 - DNA, 557 bp, Rattus norvegicus
tttttttttttttttttccgaataaagtttattaaataatatgtacagcgaagtagtaattcaacatgtctatcaaatcaatccacggcagtaaggaaaaacaataaatgaacagaaaaacctgtgtctgcgtagtacacgcgcttggtgtgcaatttaaatgcaatactctaataggttacatagatcggttttgtttttttctctcaataatgtcttcttttttggtagtaacctattccagcaatgtgacttaatactactgcagataaataggactgcaaacgtaaaactgcaaatatgatatgatagctgtcttctcttccccagagaacgagtgaatatgttaacaatttcccaggactatttttgtgctaaaggtccgcaagtgaattattcgaaattccttcatttaaataaaagtgttgggggggggaaacccttcgtgacttcattttactccctttctgctcaacttttaaaaattatttcttctatacaaggtaagtacatgggctccacaaagttaaacatacattacatatttacagtcccac

SEQ ID NO: 429 - DNA, 453 bp, Rattus norvegicus
tttttttttttttttttggtgagcagtagtttccaacttttatttgagaaaaacagaaagtacatgtatcaaaagagcattcagattgacagagagggagggctggtgacggctactggggatgggtagcaagctgaaggcttctacttggctccagactgttccgactctgggcctccaatttgggcacgggcctcgaaagtgaccggaatggtgatctccgctgattgtgtgactgctttgggcagcggagcctccaccgtgagtgtgccctcaggggacagggaagaggacaccaaggtggggtccacacctggagggagcctagaggagcagaaacaaaggacaagggttacacatccctcctgaccccgccctccgcccagggtccgctcccccaccccccagctctccatgcaaggaaccagaactcacgtgtatttcccctcgtgc

SEQ ID NO: 430 - DNA, 376 bp, Rattus norvegicus
tttttttttttttttttaacttacaaataagtgtttattagcccaagttgccttcttttttgttggattcataggcatcacagacgacctaaggcatgacacactacatgtttgttgttttgtcaggaggccctgccagctgtcagtgctgggctacatgaaggaccctggtcaggtggcaggattctaatcacgtggtttttttttttttttttcaggtacctgccaagttgctgtgcaacccaagatcacaaagtcttccaggacgccccggtgcacaagaatcaaggccctataccaatactgaaggacttgggcctcatgctgtggtagtcatcttcccttacaggaactaatgctttagccttcaagctgt

SEQ ID NO: 431 - DNA, 435 bp, Rattus norvegicus
  misc_feature (1)..(435): n = a or c or g or t
tttttttttttttttttacatgtctctgtttaatgacccagccagctctgcccagaaaaagctcatgccccagtagggaagtcctcctcctggctgctgtcccctgaagagcccaccagagctctcactagcagcatccatccagtcctgtctcagcgtggcagcctcatcttagctccttcaccaagctgtcgatggaggccagcagttcccggaagtagccgtcatcttcaccttcttggagctccagggaggccanggcttggtattctgcctggagactgcccagtgtccggctcagctccaggtcttgacggtagcggtcccggcaggtggcgaggagggcgcccagcgtctgcagcaccttctcccgagcgtcgtgctctggaagggccangagctgggccgtgatctcacaccagccctgttcccgca

SEQ ID NO: 432 - DNA, 200 bp, Rattus norvegicus
tttttttttttttttataaagaaccatatttattttcatttacagcatcaagtatcataaataaacctaaacatcgcttgctgtgtgtgtaaaatacagggttccgtatggcactgtaaatgaattctctagggtcacagacatgccacgagatggagaggagactgtctaaagaggctgagagcaggggtggggtgcgg

SEQ ID NO: 433 - DNA, 1468 bp, Rattus norvegicus
cgcccgggcaggtgtaccatggcggtctctctcctgctgcggggaggacgaatccgggcgctgaaggctgcccttctcgaggcaaaggtgttccgaggagaactggcttctacagtgcccctgtctacagagtccgagaataataaaaaggcggcaggaccaactagcaagacggaaagtgtgttcaaagatgtggtgggagcagaggagagggccaagctcctagacactcacacagcagcggcactgtccaaaagctcccctccacccagttcttacccatcagtggagaacacaggtggggctgtcgcaggcctgccgctcacagacttgtcaagaaagactttggtagcgtttcctcagaaagttacgcctccaccgcatgcctgggcttctgactcggaggctcggcggcatgtccagaaagtgacgaaagattcatcttcatcttcctcatccagctcctcagattcagactctgatggggaggaacatggctccgacattggtccccgagtggcaagcaaaagcaaggcagggttttccaaacctgaggcttctcgtccctcgaagaacggagcccctaagatcacagtttttgcaaaagagaaggccaaggtgcagaagccacacacagatgtcacctacccagagaagcccctgcagcctaagaagaaagggactttcaccaagcctgtagaagatagtaaagaaatcaggtccaagctcatgacatccaagccacagtccagtgaggttttggagcaaaaaatgaaggaaaaacagcaccagggaaaacggagaccagacaagacaggaaaggaaagcacagagctgtttgaagctgaaggaattttacccggccacaggaaagccagagtttccacacagcccacaaccggaacacaagaggccagcgcagaactccggccagccgctgcccccgagtcgggagctagacaggaagccaaagggccagagctcgaatggaagaccgcttctcccctggtcagaaaagaaagcctggagaagcaggtgccagaagggagcttccaggcggaggaggagacctcaggagatcagacactagggagatattcgaagacagttcctgttgaggagaaaaatacctttggagagagagctggaccacaactggaggggacgttccaggcgccagccggcgaagccccgcccactgatgcaggcccaccccaggaagccccaggcgacacacaggagcccacactggttcccgagtcgagtgacaccaccacctacaagaacctgcagcatcatgagtacaacgcattcaccttcctagacctgaacctggacctctccaagttcaggctgccacagccgtcttcgggacgagagtcgccccggcactgaactcaactcagggtagacccccgtgtggtcccttgaattcttgcctgtgagaataaaagtcagaggcacaaat

SEQ ID NO: 434 - DNA, 1795 bp, Rattus norvegicus
gcgagcggaaggaaggaagcctgtgtgcatctagctggtccaccagtccaggacacaacatctcccagtggccagtttgggcgccctgggacttcctacagctggccatggcagactctgcacaggtgccagcactggtatacctggtcacaggtggctgtggcttcctgggggagcatattgttcgaatgctgctggagtgggagcccaggctccgggagctgcgtgtctttgacctgcacctgagttcttggctggaggagctgaaaacagggcctgtgcaggtgactgccatccagggggatgtgactcaggcccacgaggtggcagcagccatggctggatctcatgtggtcatccatacagctgggctggtagatgtgtttgggaaggccagtccagagaccatccacaaagtcaatgtgcagggcacacagaatgtgattgacgcttgtgtgcagaccgggactcggctcctggtctacacgagtagcatggaagtggtagggcctaatgtcaagggccaccccttctacaggggcaatgaagacaccccatatgaggccatccacaggcatccctacccatgtagcaaggccctcgctgagcagttggtcctcgaggccaatggaaggaagggactgcgctttggaggtcggctgtttcgggccatcccagcttccgtggagcatggtcgggtctacgttggcaatgtggcttggatgcatatactggtggcccgagagctggagcagcgggcagcactcatgggtggccaggtgtatttctgctatgataagtcaccttataaaagctacgaggacttcaacatggagtttctgagtccctgtggacttcggctgataggcacccacccactgctgccctactggctactggtgctgctgactgccctcaacgctctgctgcagtggctgcttcggccgctggtgctgtacacacccctgctgaatccctacactctggctgtggccaacaccacctttactgtcagcaccaacaaggcacagcgccatttcggctacaagcccctcttctcatgggaagagagcagggcccgcaccattcactgggtgcaggccatggagggttccgcctggtgatggcagggccaggaactggagaccactgtggcacactccaggtcctgagcccccaaaagcctggacggagagaaatggctaccttttgaagctgctgactctgctagacacatcaggactgtgctatggaccctgccacgtctgtgcctggttcatatcccagtctccaagttctaggacagagtctgggtgcaggcctatctttggtgccaactcgggcctgccagctagttggcaaaaactgattcctgaatggtctcactaccccttcctgtttctagtttctcaagcagggagggacagagactccagaggtctgttgctggcctgcttactccaggtaccattttcagacctggctcctgccacatctggttctccattttcttttcttttttttttttctttttcttttttttttatttttttcggagctggggaccgaacccagggccttcgcttgctaggcaagcgctctaccactgagctaaatcgttttcttaagtgtatctcttttagacatttttcttttaatttgctttaaagaaaactgaaggaatgaatggttttccatgtcttgccttcttaacaaattcagctatgatattgttagcttcctccctgaggatgccaacctgtatctggccacacctggattaaaatcctttgcc

SEQ ID NO: 435 - DNA, 1267 bp, Rattus norvegicus
gccaaacccctgccctactgacctctcccctagaggagcacaaggggactcacagccgccctgggcaagaggcaggctctgagtgaggacttagagactgcagagcctcagttcagttacagcttgagcctgccgcagtaatggaggaccagaaacaagattatctgtgatactgacagaggggctgtgagacaaggctaaaaaacagagcagtcacttcagcagagtgagcagggctgcaggtccacccacaattccacaatggccggttctgtgctggagaacatacaatcagtgctacagaagacttgggtgcgtgagttcctggcggagttcctgagtacctatgtcttgatggtgtttggccttggttccgtggctcatatggttctaggagaaaggcttggcagctatcttggtgtcaacttgggttttggtttcggagtgaccatgggaatacatgtggcaggcggcatctctggagcccacatgaacgccgcggtgactttcactaactgtgcactaggccgaatggcctggaagaagttccctatatatgtgctgggtcagttcctgggttccttcttagctgcagctaccacctacttaattttctatggtgccattaaccactatgcaggtggagaactgttggtgacaggtcccaaatccactgcaaacatttttgccacctatcttcctgaacacatgacgctgtggcggggcttcgtggatgaggtatttgtgactgggatgctccagctgtgtatcttcgccatcacggacaagttgaacagtccagcacttcaagggaccgagcccctcatgataggcatccttgtttgcgttcttggggtgtccctaggcatgaacacaggatatgcaatcaacccatcccgtgacctgcctccccggttcttcactttcattgctggctggggcaagaaagtgttcagtgccgggaacaactggtggtgggtgccggtggtggcaccccttctgggtgcctacttaggtggcattgtatacctgggcttaattcacgccggcataccaccacagggttcttagagattggagaattgtacaacaggagaccagaagacgacagcatcgtccaacgatcccctcaccccatctcttctcctccaacttctgcgaaacctaccctacccataagtggttctgtgcctctagcttctagagtacttcttagtagagcttgtctgtgaccacaacccttctgcaataaagcacacctcatacc

SEQ ID NO: 436 - DNA, 6251 bp, Rattus norvegicus
tctagagtggttctacatatggctttggttctttcagaacccccaagtccattggtttggtactaagttatataacaagaaactgagtgttgtctaataataggggaaaggcactttttaaagaagttagtgaccttgacaattggctccttagtgggattgtaacagatttttaaatgtgggggataaactagaacagttgtctttaaaatatactgtgaagttatttcctatggtaggctttgagatttcaagataaatcacctttttgactctgaataatttaagtttacatgactgttctgtatttaacaaaaaattgtttggctaggatattagactttcgaaatctgaaatatatatccaggtgtaactagattcattgtaggtgtaaatgggctaaggtgtgttaaatatgctgaaagttattgcctaattgaattggtgagcttgtgttactaatattaaggcctcaatattgtttctaagtaacatgtccctatatacaatttgtattccagcaaatagctcctgataaaaacagtgctttagtaatagtaaagctctccatacttcatgcactggtgttgaatttgttcccttcagagttccgggggtactgccagtgagattggtcaggcggttaagagtgcttgttcccaagcctgttgtgacctgagtttaatccctggacctaggacacataatggagagaagcccatacctcttaatgttttcagttgaacaccatcgcacaagtgtgagccatgtatcgaagtaatgcagcatttttaaaatttgataatcacctacaaattcatagctatatttgaacctcaggttagacataaacttagttacagaagatagggttaatagtaatagttaagttgaaccaggaatttttattttccagataagatttgtgaccaaatcaatgatgctgtccttgatgcacaccttcagcaggaccctgatgctaaagtggcttgtggtaggtacaaaaccctgcttatgagtgggggaaaagggttttgtttttgtttttgtttttttcccctcagagctggggaccgaacccagggccttgtgcttgctaggcaagcgctctaccactgagctaaatccccaaccccggaaaaagggcttttaaagcctacctaaagtattataggtaataccagctacttgggaggctgaggctggagggagcatgttaaataaagtcctatgtgggtaatttgccaagaccttatctcaaaaatagaaaatgaagcccagggatatagcatgtataacataatttgagtccctcagtcccaccccagtcaccctcattgaatagggtgatatctttaaatatcaagtctaaatttttgttttattagaaactgttgctaaaactggaatgatccttcttgctggggaaattacatctagagctgccattgattaccagaaagtggttcgtgaagccataaagcacattggctatgatgattcttccaaaggtaggttatagaggggtcccccccccccccgtaaactcaattttgcagataaagaatgtgatgctagagtgaagcttctagaatattccttccttgaaatctttgattctggttgcatagttaaacaatatcctctcatctttctgaggctgcctattctgtcctctaaaatgctacatttattgtaaaagcagtctcttatcctacaaataaacagatttatatcaatagtagccagatacgatatgcctgtaagctcagcttctcagtgtcagtgtgggagttaggtgtgcttagttgtagtttgaagctaaccaagttagagaccttgtttcaaactgttgtctagagggggcaggcctcctagagagtcttttaagagtgcttgaccacttactttggcatgtccagaattctagcagcagcacagcactgccattaacattttggaagttaaaacaaggattattggaacaccttgttttatagggtttgactacaagacttgtaatgtgttggttgccttggaacaacagtcaccagatatcgcccaaggtgttcatcttgaccggaatgaggaagacattggtgcaggagatcaggtattgtgatagtttgttaggatctcttaacttattctaaattctaaagcttgtattgaccacttcttcatatttttagggtttgatgtttggttatgccactgatgaaactgaagagtgtatgcctttaactattgtcttagcacacaagctaaatgctaaactggctgagctacgccgcaatggcacattgccttggttacgcccagattctaaaactcaagtaagtggcaatcctaaacctacatttgtctcaaatcacattaaaattcccaagtaagttaactatagctgaatggggaggataatacttgtctttactatatttaaacttgggaagagaacccctataaagctgttgagttagacaagtattctcgtctgtttggcattcaaggtgactgtgcagtatatgcaagatcgaggtgctgtgattcccatcagagtccatacaattgttatatctgttcagcatgatgaagaagtttgtcttgatgaaatgagggatgctctgaaggagaaattgatcaaagctgttgtacctgcaaagtaccttgatgaggatacaatttaccacctacagccaagtggcagattcgttattggtgggcctcaggtaatagatgaaatgcctatggtttatcattggttactaaaaactttggctgccactattttttttctagctaccctgccctgttccctttacacacactcacttgtaaggcagggaaaagttggatcagagttacggccagcctggattacaaagcaggttcctagacagccagggctattacacagactctcacagaaaagaaaaaattacatgacttaaatcctataattccagggtgatgctggtttgactggccgaaaaatcattgtggatacttatggcggttggggagctcatggaggaggggccttttcaggaaaggattataccaaagtggaccgttcagctgcttatgctgctcgttgggtggcaaaatcccttgttaaaggaggtctgtgcaggagggttcttgttcaggtatgtaatgagtgaacgttacatgggagaagggtacttagttaaatgtttcaaatactttcctcttttataacaacgtcttactgacttttaggtctcttatgctattggagtttctcatccattgtcgatctccattttccattatggtacttctcagaagagtgagagagagctattagaaattgtgaagaataattttgatcttcgccctggggtcattgtcaggtaaagatggtaaagcctattgctagtgagaaataggggggtggaacatatactaaaatctgaggaggtaaaggtagcctcctcatgagggaaaacattttaattgctggaacatgccaatattttaaattggctggagagggacctagttgttctgtgacttaacattctagaaaggtctccatctttgattcttagctttgtgcttatcttaaataagggtactacattaagaattaatgagttaaagtgggatgctcaaagttaaaagaaaataaccatagtgatcattggttggaccttggtaagtactcaattggaattcctgagaatgataagtttttgtatttgtcaagccagggctggaaaacgagaactgtagttattaatggggactgtgcaagtaacacaagggaagtaacaaacacttttgccatgaacttttttcctagcaaaccccagggagaactgaactcatttgccagagctcttgaaatgagtcttgctgattgttttgctttgttttaatttaatgctacatattaagttatggacttatatattccagggatctggatctgaagaagccaatttatcagaggactgcagcctatggccactttggtagggacagcttcccctgggaagtgcccaaaaagcttaaatattgaaagtgttagccttttttccccagacttgttggcgtaggttacagagaagccttcaagctctgagggaaagggcctttttcctaaatttttctgtcctctttcagctcctgatcagttgcagtcactctaatcaatgacatgaattttagcttttgttggggactgtaagttgggcttgctattctgtccctaggtgttttgttcaccattataatggatatagtaagcataggtgacccatgtaactgcctagaaacaaacactgtagtgaataatgctttgaaatcgaacctttgtgccctatcacctaatcctccaaagtcctaattgcaattactttcccaccagatgctgaaaatgtccttgtaatgtgcacgtaaagtacttgtgtttgactcacagccctgtcagcatgaatttgtaatgtcttgagctctatttattgaatgtgaagccccctccttcccttatcctccctgtaactcagtcatttctaattatgtagttctttgtcagggagtgttcctatccaatcaaacttgcatgaaacgaaaagtttcaattggagctctagcctgacttaaagaaaaaggcagttacaattaaaccatctccctggtgcttatgctataaattgccacctcaaacagcaccaaatcaaaatctctccacttttcagctgtctttggaggacgtagtaataaggttttatttagtaaaccaatcctatgcatggtttcagcactagccaaacctcaccaacttttagtctagaaaacaggcacttggcacccttgtgatgtcatacagagaagtcacagggcagtacccgagggtctgtaggttgcacactttggtaccaggtaacttttttttctttataagaaagagtactccacactgcacaatagctcctcccagggtttttaactttgttttattttcaaaaccaggtccaatgagctttctgaacagctggtgtagctacagagaaaccagcttccttcagagagcagtgcttttggcggggaggaggaaatcccttcatacttgaacattttctaattgcttatttattgtattctggggtatggcgtaagtacagagaagccatcacctcagatggcagcttttaaaagattttttttttctttgacaccatgattcctttaacatgtttccagcattcccaggtaggccaaggtgtcctacagaaaaaccttgggttagacctacagggggtctggctggtgttaacagaagggagggcagagctggtgcagctggccatggagaagctgacttggctggtgtggtacagagaagccagcttgtttacatgcttattccatgactgcttgccctaagcaagaaagtgcctttcaggatctatttttggaggttattacgtatgtctggttctcaattccaacagttaatgaagatctaaataaaatgctaggttctacccaaactaaactgtccattacttgtctgttgttgctttctgagttataatttatagcgtctgccacccattgccaccaataaagttttcaaccaggtctaagatagtcatgggggggttggggatttagctcagtggtagagcgcttgcctggaagcgcaaggcccttggttcggtccccagctccgaaaaaaagaaccaaaaaaaaaatagtcatgggtacttggtactgttcatacactggtgtgtggaggtcagaacctgagttatttacatttactacatgaggtcctggtaatgaatattcatgtcttaagtcttgggtaattagcccccttcccaataagcacctgtggcagaagcaagtagattctcaagttgaaggctcaacagttcccaggaacaggttaggggcttttgtggtgataggaatttagtttatttgctagataagcattttgtttagcactaaaaacatgagatttgtttatactgtgcctggtggtgatggtatgttccttaaatcctagtacttggaaggcaaagatgaacataatatagttcatcagtttctgggagtctaagaaaagtggcacatgtatctatcccagcattgaagagattgagttaacatgggcaaacccttatctcaagcttttagatgcttgtttgctcaagacaggaaccagagagattgctcaatggagtggtaagaaccaggacaaatgggaattc

SEQ ID NO: 437 - DNA, 4945 bp, Rattus norvegicus
ccaaagttgagctttggaacaggccggcttcccctgtttttgtggatttgtaggatagccaatttccccccatctcgactttcaactgctttggacattagcttcataggaagaattcattctttagagtaaaatggagcgccgctttttgccaggggccccagcccctctgtttttaccctgtcagaagttagaatgtcactaaaaagtgaggcccgggtgaacacttctacactgcagaagatcgccgcagatatgagcaacctgatagaaaatctcgacacccgggaacttcattttgagggagaggaggtggagtatgatgcatctccaggagaccccacggctcaggaagcgtgcatcccattctcttctatttacaacactcaaggatttaaggagcccaacatccagatctacctctctggctgtcctgtaaaagcacaagtactggaagtggagcgcttcacgtcgacctcgaggatgccaagtgtcaacctgtacaccatcgagttaacacacggggaattcacatggcaagttaagaggaaattcaagcacttccaagagtttcatagagagctcctcaagtacaaagccttcatccggatccccattcccaccaaaagacatacgtttagaagacaaaatgtcaaagaagagcccagagaaatgcccagtctgccccgttcatcagaaaatgcaatccaggaggagcagttctttggcaggaggaagcaactggaagattacttgacaaaaatactaaaaatgcccatgtacagaaactatcatgccacgacagagttccttgatgtaagccaactgtcttttatccatgatttgggaccaaagggcctggaaggaatgatcatgaaaagatctgggggacacaggataccaggtgtgaattgctgtggccatggaagagcctgctaccggtggtcaaagaggtggttgatagtgaaagactctttcctgctgtatatgaaaccagacagcggggcgatcgccttcgtccttcttgtagacaaagaattcagaatcaaagtgggaaagaaggagacagaaacaaaatatggacttcgaattgataatctttcaaggacactgattttaaaatgtaacagctacagacatgcccggtggtggggaggcgccatcgaggagttcatccagaagcacggcactgacttcctcaaagaccatcgcttcggctcctacgctgcggtccacgagaacattttagctaaatggtacgtgaacgccaaaggttactttgaagatatcgcaaacgcaatggaaggggcaacggaagagatttttatcacagattggtggttaagtccagaaatcttcctgaagcgcccagtggtggaaggcaaccgctggaggctggactgcatcctcaaacggaaagcacaacaaggtgtgcggattttcataatgctttacaaagaggtggagctagccctcgggatcaacagcgagtacaccaagcggactttgatgcggctgcaccccaacataaaggtgatgagacacccagaccatgtgtcctccagtgtgtatctgtgggctcatcacgagaagctcgtcattatcgaccaatcggtggcgtttgtgggtgggattgacctggcctatggacggtgggatgacaatgagcacagactcacagatgtgggcagtgtcaagcgggtcacctcaggacagtctctgggctctctcacggcagcatcagtagagtctatggaatccttaagcctcaaggacaaacatcaatctcataaaaacgagcccgtcttaaagagtgtcgacgataccgacatgaaactgaaaggcatagggaagtccaggaaattctccaaatttagcctctatcgccaacttcaccgccgtaatctgcacaactcggacagcatcagcagcgtcgacagcgcctccagttattttaaccactatagaagtcatcagaatttaatccatgggttaaagccccacttgaaactctttcgcccttccagtgagtctgagcagggcctcactaggcacagtgctgacaccggctccatccgaagtgtgcagacaggagtgggagagctccatggggagactaggttttggcatgggaaggattactgcaactttgtcttcaaggactgggttcaactggacaaaccttttgctgatttcatcgacaggtactccaccccccggatgccttggcatgacattggttctgtggttcacggaaaggcagctcgtgacgtggctcgacacttcatccagcgctggaacttcacaaagattatgaagccaaaatatcgttccctttcttatcctttcctgctcccaaagtctcaagccacagcgcatgagctgaggtatcaggtgccaggggccgtccacgccaaagcgcagttgctccgatctgctgctgactggtctgctggtataaagcaccacgaggaatctatccatgctgcctacacccatgtcatagagaacagcaagcactacatctatattgaaaaccaatttttcataagctgcgctgatgataaagtcgtgttcaacaaggtgggcaatgctatcgcccagagaatcctgaaagcccacagggaaggccagagatatcgagtgtacatcgtgataccactgctgccgggattcgaaggagacatttccacaggcgggggaaatgccctacaggcaataatgcacttcaactacagaaccatgtgcagaggggagagctccatccttgaacagttaaagccagagcttggtaacaagtggataaattacatatcattttgcggtctgagaacacatgcagagctggaaggaaaccttgtcactgagctcatctatgtccacagcaagttgttaattgctgatgataacacggttatcataggttctgccaacatcaatgaccggagcatgctgggaaagcgagacagcgaaatggctgtcatagtgcaggacacagagacagtcccgtcagtgatggatggaaaagaatatcaagctggccgcttcgctcaaggccttcggctggagtgcttcaggcttgtcctgggttatctttctgacccaagtgaggacattcaggatcctgtaagtgacaaattcttcaaggagatttgggtttcaacggcagctcgaaatgctaccatatatgataaggtcttccggtgccttcccaatgacgaagtgcacaatttaatccagttgcgggactttataaacaagcctatattggcaaaagaggaccgccttcgtgccgaggaagaactgaggaagatccgtggcttcttggtgcagttccccttctacttcttatcagaagaaaacctgctgccttccgttggaaccaaggaagccattgtgcccatggaggtttggacttaagataaaccttttgtagttgagggtcttccaacctgaagactacagtatatgctgacttctaaggacttcacagccatagccaggcctgatgtcctcctgtgaactggtgtaaggatgctggacataaacagggcttcatcactcctccgacttgtccttgagaaaagtggctacatcctgttgatagcatatgctcaaataataccaaacatggagacaaattccgtgatatatttcaaaacccattccctttgctaacaagaatctgtctgtaactttgatccgggttgccaaacgttgcctgagcactgctgttcttcgctgatgtccgtttacacgctggggcccaccttgtcatccatacagcactgtttacaagattgcttatcaatgaaagacattggagaagctgccttgagggtcctcaaggatccaggtgatgcctgtacccaacctggtcctgatgtgagcttatttaccacgccaaaacttttctctctgttctttttcagtcactgtagggacagaacaggctttgcctacctacccacactaggcacttcttaacaacaggcaggcattaagtcctaatactgaagaagattccagttcccagagatgctgcccagctgtgtccttgtcatctgataacatttgtaaacatgtgcagcgcatgtcaatacatagcaaccagataagcacagatggagcctccaaggtgtcagtgggaacccagttcagataaaggacaatattcctgacagtctgtctttcttagccactggattgatagaaaaaaagttgattctctccactgtaagtccagtggatgttaatttgtcttccaactgaatcaaaggctttataatgcccttttcctaagaaacatgagtctaacctgatttacccttcagttttccactaggccttcttcaggggaaaaagcaatgattatacaagatctctcctttgcttgtactgtcaactacatagtaacattccaacatagcttccaaagaagcgataattcacattgttccaatgggatatccacattccctttcagatggtattgtgtcctttgtagaccaaatttcagagttccccttgtatcatgggagtgtctgtgggtgcctggaagcctggagcttatgcacgtgagataactatgtgactgtaagcaaaaggggttcactggagtaaaatctcttcaaagctgctcccgacccatgtttttatgaataaatatgctggtttaaaagatgacacaggaccacaaagccagtgatgtggattagtaacagagcagcagtcacatccaaaggaggatgtcacccctgaggaacactgtacaaatgaggtgggatttgtaatcaacaatggaaattaacatgtttttatgaataaataacttatttcttatatggccaaggatgataaaattatttcattctatagttatggtgaataaaacactttatgcagataaagatctgattacatttaaaatagtcaatgtatatgg

SEQ ID NO: 438 - DNA, 1587 bp, Rattus norvegicus
cgcaggttgtggctgcacacactcgtcaaaatgaagattgaggaggtgaagagcaccacgaagacgcaacgcattgcctcccacagccacgtgaaggggctggggctggatgagagcggcctggccaagcaggcggcttcggggctcgtgggccaggagaacgcgagagaggcatgtggtgtcatagtcgaattaatcaaaagcaagaaaatggctggaagagctgtcttgttggcagggcctcctggaactggcaagacagccttggccctggctattgctcaggaactgggcagtaaagtccctttctgcccgatggtgggtagtgaagtatactcaactgagatcaagaagacagaggtgctgatggagaacttccgaagggctattgggctgcggataaaggagactaaggaggtttatgaaggggaggtgacagagctcactccctgtgagacagagaaccccatgggtgggtatggcaaaactatcagccacgtgatcatagggctcaagactgccaaaggaaccaaacagctgaagctggaccccagtatttttgaaagtttgcagaaagaacgagtagaggctggagatgtgatttacattgaagcaaacagtggagctgtgaagaggcaaggcaggtgtgacacctatgccacagagtttgaccttgaggctgaagagtatgtccctttgccaaagggagatgtgcacaagaagaaggaaatcatacaggatgtgaccttgcacgacttggacgtggccaatgcgcggcctcagggtgggcaagatattctgtctatgatgggccagttgatgaagccaaaaaagacagagatcacagataaacttcgaggggagatcaacaaggtggtgaacaaatacattgaccagggcgttgcagagctggtccctggagtgctctttgttgacgaggtccacatgctggatatcgagtgctttacctacctgcaccgagccctggagtcctccatcgcccccattgtcatctttgcatccaaccgaggcaactgtgtcatcaggggcaccgaggacatcacttctccacacggcatcccgttggacctgctggaccgggtgatgatcatcaggaccatgctgtatacgccacaggagatgaagcagatcattaagatccgagcccagacggaaggcatcaacatcagtgaggaggccctaaaccacctcggggagattggcaccaagaccacgctgaggtattcagtgcagctgctgacccctgccaacctgctggccaagatcaacgggaaggacagcattgagaaggagcacgtggaggagatcagcgagctcttctatgacgccaagtcctccgccaagattctggccgaccagcaggacaagtacatgaagtaacgtagggtttggaggtgcacccagaggacagaccccacaccgaggacagggtcttgcgttgagcatgctttgcagtgttacagtttgtttgtaaattatcaaacctccaaggttgtttggaaggaaccctttcccacctagcttgtttttctaataaaactgaatcttattttgatgataaaaaaa

SEQ ID NO: 439 - DNA, 2151 bp, Rattus norvegicus
ccgaaaagatgtctctagcctggagaacattgcagaaagctttctacctggagacctctctgagaatcctccagatgcgtccatccctgagctgtgcttctcggatatatgtacccaagctcactcttcatacaaagcacaacatgccaccatgtgacttctcacctgagaaataccagtctctggcctacaaccatgtcctggagattcataagcagcacctttctcctgtgaatacagcctatttccagaagcctttgctgctccaccagggacacatggaatggctctttgattcggaaggaaacagatacctggacttcttctctgggattgtaactgttggtgttggtcactgccacccgaaggtaactgccgtggcaaaaaagcagatggaccgcctgtggcatacaagttctgtcttcttccactctccgatgcatgaatatgcagagaggctgtcagcactccttcctgagcctcttaaggtcattttcttggtaaacagtggatcagaagccaatgacctggccatggtgatggccagggcatactcgaaccacacagacatcatttctttcagaggagcctatcatggatgtagtccctacacacttggtctgacgaatgtaggaatttacaagatgaaagtccccagtacgatagcctgccaatcgacaatgtgcccagatgttttccgtgggccttggggaggaagccactgtcgggattctccggtgcaaacagtcaggaaatgcagctgtgctccagatggctgccaagctaaagaacggtacattgaacagttcaaagacacactgaacacttctgtggccacgtcaattgctggattttttgcagagccaattcaaggtgtgaatggtgttgtccagtacccaaaggagtttctgaaggaagcctttgcactggttcgagagaggggaggtgtatgcattgcagatgaagtgcagacaggctttggaaggctgggctctcacttctggggtttccaaacacatgatacaatgcctgacattgtcaccatggctaaagggattggaaatggcttccccatggcagcagttgtgaccactccagaaattgcgagctctttggctaaacacttacatcacttcagcacatttggaggaagtcccctggcctgcgccattggatctgctgtgcttgaggtgattgaagaagaaaatctccagagaaacagtcaagaagttggcacctacatgctgctaaagtttgctaagcttcgggatgaatttgacatcgttggggatgtgcgaggcaaaggccttatggtggggatagagatggttcaagacaagataagccgccagcctcttcctaaaacagaagtcaatcaaatccatgaggactgcaaagacatggggctcctagtgggtagaggtggtaatttttctcagactttccgcattgcgcccccgatgcgtgtcacaaagctggaagtggattttgcatttgaagtatttcgttctgccttaactcaacacatggagagaagagctaagtaagaagagccccaagcctcaagaacttctcaactatgctcagagttggattggagagatgctgaaaccacaagtattagatagaaaaaaaccctgcagccctctgaagtaattgtaaaagactcgatggactatctactggctacatttgtcaactgagtccccattctcctgataattccatccttcaggagaagtatctgtcactggctcacagaataagtcttagtttgtgtagattagtctgggctaatgttatttcccgttgcattaactggtttgtaaatgaatacacagtatatgtgtcgccgatgagtcctgaagtaaatcctttccgtgacactacctctgggcaaacattttttcatgcttcagctcagatgcctctcgtcacactggaaacttcggcctctcatgatgcggtttctcaattcacaccaggcacctggaagccctgtagggataaagcctggtcactgtactacgctgggaatgtggttggaagctaagaggttggtaatgtcaatgaatcactgaccatgaatcctggaaccaccctatctcagggtttcttgatttatgaaacaataaattcgtggtgctgctt

SEQ ID NO: 440 - DNA, 2221 bp, Rattus norvegicus
gctccagcagaccctgaaagctgagctgtccagacccccgaagtgaagaaaagaggcgagggcaagggagggccagaaccgagggagagagaaaggaggggcagcccaccagcccgctgtcctgccacagaaccggctcagctccagctccaggagtcactcagctgcagaggcagtggcagccccactcctcaggcaaagggcagcagacagacagacagaggtcctaggactggaggtcctcagtcattgaccactcagcctggcccagccccatggccttcaatgacctcctgaaacaggtggggggcgtcggacgcttccagttgatccaggtcaccatggtggttgctcccctactgctgatggcttcccacaacaccttgcagaacttcactgccgctatcccccctcatcactgccgcccacctgccaatgccaatctcagcaaagatggaggtctggaggcctggctgcccctggacaagcaaggacaacccgaatcgtgcctccgctttacttccccccagtggggaccacccttttacaatggcacagaagccaatggcaccagagtcacagagccctgcattgatggctgggtctatgacaacagcaccttcccttcaaccatcgtgactgagtggaaccttgtgtgctctcatcgggctttccgccagctggcccagtccctgtacatggtgggagtgctgctgggagccatggtgtttggctacctggcggacaggctgggccgccggaaggtgctgatcttgaactacctgcagacagctgtgtcgggaacctgtgcagcctatgcacccaactatactgtctactgcgttttccggctcctctcgggcatgtctttggctagcattgcaatcaactgcatgacactaaatgtggaatggatgcctatccacacccgtgcctatgtgggcaccttgattggctatgtctacagcctgggccagttcctcctggctggcatcgcctatgctgtgccccactggcgccacctgcagcttgtggtctctgtgccttttttcattgccttcatctactcttggttcttcattgagtcagcccgctggtactcctcctcaggaaggctggacctcaccctccgagccctgcagagagtggcccggatcaatgggaaacaagaagaaggggctaagctaagtatagaggtgctccggaccagcctgcagaaggaactgactctaagcaaaggccaagcctcagccatggagctgctgcgctgccccacccttcgacacctcttcctctgtctctccatgctgtggtttgccactagctttgcctactacgggctggtcatggacctgcagggctttggggtcagcatgtaccttatccaggtgattttcggtgccgtggacctgcctgccaagtttgtatgcttcctagtcatcaactccatggggcgccggcctgcacagatggcctccctgctgctggcaggcatctgcatcctggtgaatggcataataccgaagagccatacgatcattcgcacctccctggctgtgctagggaagggctgcctggcttcctctttcaactgcatcttcctgtacaccggagagctgtaccccacagtgattcggcagacaggcctgggcatgggcagcaccatggcccgggtgggcagcattgtgagcccgctggtgagcatgactgcagagttctacccctccatgcctctcttcatcttcggcgctgtccctgtggtcgccagtgctgtcactgccctgctgccagagaccttgggccagccgctgccagatacagtgcaggacctgaagagcaggagcagaggaaagcagaatcaacagcagcaggaacagcagaagcagatgatgccgctccaggcctcaacacaagagaagaatggactttgagaacggaagggcttcacacagcactaaagggagtggggttctacaggtcctgccgtctacatgaggagggggagtgagtagagggactggaccatccaaatgtggaggctgccattcagagaaatccctccccaaaggtcatgtcagtagacccactaggaacaaaagctctgactatgtgcagcttcttaagcagaatgttctcgtcaccggccatcttcctgctcatggtcactccgccacctccaggaccttgcaaagaatctcagacaattaaatgaatctcttct

SEQ ID NO: 441 - DNA, 3730 bp, Rattus norvegicus
gaattccggtctgaatgttgtgtgaaaagagaggaaagatgggctcttcaagactcttggacttctagaaagtcagcttttgagcctaatttttggtagatctcattacagcgtgggctctctctctctctctctctctctctctctctctctccatccctcccttcaagccctcccctgcatctcagccggagcctctccgaaccggcgctgatcgatgccgagactccccagggaccctatcgcgactccatcgtgccatatctcgacatcaccgtaccctgtcgagactccattttgtcacaacccctttcaatatttatctattatatatatttttaaaatttgccctatcatatttgggggctgtccccttcatgtcgtgatttcgctgtgatctctccgtgacatcaccgcgccatcgtgaagtgtgatctcatcgctgccctgtcgttcgacttcatcaatgtcgtgttgtgacctggctgcggcgggacagttgggcaaggcgggcatcatggcctcggattgtgagccagctctgaaccaggcagagagccgaaaccccaccctggagcgctacctgggagccctccgtgaggccaagaatgacagcgagcagtttgcagccctgctgctagtaaccaaggcagtcaaagcaggtgacattgacgccaaaactcgacgtaggatctttgatgctgttgggttcacctttcccaaccgactcctgactactaaggaggcccctgatggctgccctgaccacgttctccgggccctgggcgtggccctgctggcctgtttctgcagcgaccctgaactagccagccatccccaggtcctgaacaagatccccatcctttgcacattcctgacagcccgaggggatcctgatgatgctgcccgccgctccatgattgatgacacctaccagtgcctgacagctgttgcaggcacaccccgagggccccgacacctcattgctggtggcacagtgtctgccctgtgccaggcatacctggggcatggctatggctttgaccaggccctggcactcctggtggggctgctggctgctgcagagacacagtgctggaaggaggcagagcccgacctgctggctgtgttgcgaggcctcagcgaggatttccaaagagctgaagatgccagcaagtttgagctctgccagctgctgccccttttcctgcccccaacaactgtgccccctgaatgccaccgggatctgcaggctgggctggcacgcatcctaggaagcaagttgagctcctggcagcgcaatcctgcactgaagctggcagcccgcctggctcatgcctgcggctccgactggatcccagtgggcagctctgggagcaagtttctggccctcctggtgaatctggcctgcgtggaggtgcgactggctctcgaggagacaggcacagaggtgaaagaagacgtggtaactgcctgctatgcccttatggagttggggatccaggagtgtacccgctgtgagcagtccctgctgaaggagccccagaaagttcagctcgtgagcatcatgaaagaggccatcggagctgtcattcactacctgctgcaggtggggccagagaagcagaaagagccctttgtgtttgcctctgtacggatcctgggtgcctggctggcggaggagacctcatccctgcgtaaggaggtgtgccaactgctgcccttccttgtccgatatgccaagacactctatgaggaggctgaggaggccagtgacatttcgcagcaggtggctaacttggccatctctcccactacaccagggcctgcttggccaggggatgctctccggctcctccttcctggctggtgccacctgactgttgaagatggtccccgggagattttgatcaaggaaggagccccctcacttctgtgcaagtacttcctgcagcagtgggaactcacatcccctggccatgatacctcagtgctgccagacagcgtggagatcggcctacagacctgttgccacatcttcctcaacctggtggtcaccgctcccgggctgatcaagcgcgacgcctgcttcacatcccttatgaacaccctgatgacgtcactgccctcactagtgcagcagcaaggaagactgcttctagctgccaacgtggccaccttgggcctcctaatggcccggctccttagcacctctccagctctccaaggaactccggcctcccgaggtttcttcgcagctgccatcctctttctgtcacagtcccatgtggcacgggccacccctggctctgaccaggcggtgttggccctgtcccctgactatgagggcatctgggccgacttgcaagagctctggttcttgggcatgcaggccttcacaggttgtgtccctctgttgccctggctggcccctgccgccctgcgctcccgctggccacaggagctgctacagctgctaggtagtgtaagccccaactctgtcaagcccgagatggtggctgcctaccagggcgtgctcgtggaattggcgcgggcaaaccggctatgccgggaggccatgaggctgcaggcgggtgaagaaacagccagccattaccgcatggctgctttggagcagtgcctgtcagagccctgaggggcatccagtgggtatagacccaggggcgggcagcgagggaaggagggaggaggcatcttccctgaagcccccaaactggaccccttcttcagacccccacaaacaccccagctttctggcttttctgagggctagggcgtgatgcccacctctcaagtataagaaactgcatcctgcctccagcccccttggggcagggattggcttggaacagaggttggccccgccaggccggggaaggttggagaagtccccaggaagagggcaactaagtgtcattatacccagcgtctggctccctgacaggagggaggtcccagggtaggagcgggctggcaggcgcagactgcctcagcccatgtgccctgccggccagggcgtggcctccccaaggctgtggtgccccttctggctcccccaggccaggtccgcgccctttaaattggccgtttggcttttgcttcggtccttttggacagagagcaggctcaggccattgacatcacagttcttcctttcaactctagtgacccggggtccgagttgcccctatgcttccagggcaatttggagcagacagaccagtggggggcggggaacctccttccacctgcgcttccttgaggggaccggagtgcccttggtcccaggtctcttcaccttttgtgtcatgttgcagcagagtgaagatgggggttgggggttatttattttgcttgtccttatctctgcttggacacctgagcatcagctccctgtgcccctgctcccatctggcctggctggagccaggaacaggaggtcacatcaccctagaatccccatgttttccctgtgattgcactccactgccaccgtggtgcctggcttcagttcccctcccccccgtccctgctaagactcttctctgcagggagacgcgactggcggctccagcaggaactacctttctgaacccgtggagacccgcatacacctgaccccttgcttccgcccctccccccagtgcgttctgtgatcgccaagttcaaagctgtgcacatgtggacactcaataaatgtttattggtg

SEQ ID NO: 442 - DNA, 1679 bp, Rattus norvegicus
gactgataggcgtgtcgggcgggaccagagcgcgccccactcagcgaaagctgccgtccctctttgccttgagcgccgcagccctgagaatcgcatctggcttggaaacagtcctaagactggagtctcgaagaaagccggagacagtcgcgaagaacggaggacgcccagagactcttcggcttcccggaagtggaaccgagcatacccggaaggagctaatcccacctgaagattgctgagcacccgcaggcgttaagcctaacggagtccacgtcatggcggcggatgggacaggtgtagtcggaggaggggctgtcggcggccccctgtccaaggacggtttgctggatgctaagtgcccagaaccaatccccaatcggcggcgctcttcctcgctgtcccgtgacgcgcagcgccgagcctatcagtggtgccgggagtacctgggcggagcctggcgcagagcgcggccggaggagctgagcgtttgccccgtgagcggaggcctcagcaacctgctcttccgatgctcgctaccgaaccacgtgcccagtatgggcggggagccccgggaggtgctgctacggctgtacggggctatcttgcagggtgtagactccttggtattagaaagcgtgatgttcgccattcttgcagagagatctctagggccccaactttatggagtgtttccagagggccgcttggaacagtacctcccaagccggccattgaaaactcaagagctccgggacccagtgttgtcaggagccattgcaacaaagatggcccgtttccatggtatggagatgcccttcaccaaggagccccgctggttgtttgggaccatggagcggtacctaaagcagatccaggacctgccgtccactagccttccccagatgaacctggtggagatgtacagcctcaaggatgagatgaatcacctcaggacgttgctagacgctacaccgtccccagtggtcttctgccacaatgacatccaggaaggaaacatcttactgctctcagagccagacagtgatgacaacctcatgttggttgatttcgagtacagtagttacaactacaggggctttgacattgggaatcatttctgtgagtgggtttacgattacacttacgaggagtggcctttctacaaagcaagacctgcagactaccccactagagaacagcagctccttttcatccgtcattatctggcggaggttcagaaaggtgaggtcctctccgaagaggagcagaagaaacaggaagaagatttgctgatagagatcagccggtatgccctggcctctcatttcttctggggcctatggtccaccctccaggcttccatgtccactatagagtttggctacttggaatacgcccaatctcggttccagttctacttccagcagaaggggcagctgaccagcttcctatcaccttgaggatccaacccccacctcagatttctcctggagcctccggggcaggccctcggagggaggggcaaagagcagaagcccccagagcttgggctgtgcctctaagtgagactgtcgttgaagtagctgacctccgtactcctttcttagtacttgcccaaggggggcatctgacagcccctggggctgtgcacctaaataaatgaacttcacaaatac

SEQ ID NO: 443 - DNA, 1514 bp, Rattus norvegicus
atgtgccgcgcggggagcagctgccgagcgggcggagagcgaacgccaggggccccgtcggagcggccacaggagcagcgccggagatgggagagcagcccatcttcaccacgcgagcgcacgtcttccagattgaccccagcaccaagaagaactgggtgccggcaagcaagcaggccgtcactgtttcctacttctacgatgtcaccaggaacagctatcggatcatcagtgtggatggagccaaggtaatcataaacagcaccatcaccccgaacatgacgttcaccaaaacttcacagaagttcgggcagtgggctgacagcagggccaacaccgtgttcggtctgggattctcctcagagcagcagctcacaaagtttgcagagaaattccaggaggtaagagaagctgccaggttagccagagacaagtcccaggagaaaatcgagacgtcaagtaatcattcccaagcatccagcgtcaatgggacagatgacgagaaagcctcccatgcgagtccggccgacacacacctcaagtctgagaatgacaagctgaagatcgctttgacacagagtgctgccaatgtgaagaagtgggagatcgagctgcagaccctgcgggagagcaatgcccggctgaccaccgcgctgcaggagtcggcggccagtgtagaacagtggaagcggcaattctccatctgcagagatgagaatgacaggctccgcagcaagattgaggagctggaagaacagtgcggtgagatcaacagggagaaggaaaagaacacccagctgaagaggaggattgaggagctggagtcagaggtccgagaaaaggaaatggagttgaaggatctccgcaaacaaagtgaaatcatacctcagctcatgtccgagtgtgaatatgtctctgagaagttagaggctgcagaaagagacaatcaaaacttggaagacaaagtgcggtctctaaagacagacatcgaggagagtaaataccggcagcgccacctgaagggggagctcaagagcttccttgaggtgctggacggaaagatcgatgacctccacgacttccgccgagggctctccaagctaggcacggataactagggtggggcggagcctagatggagagtggaaagcgtgtgtgagagatgaagtgggcatagggcattctccgtttgcttctgtaatgcgggtgcgttctgtctgtctccaggccagtcgtgccgtccactcgctcctccagaatagaaaatctcttgcttctctggctttgtgaggtcgtggacacctggaagcttctgactcaggaatccagaacggtctaccttagccgtttacgcagtcagggcagggacattcagatcttcccttaagggctgttgcaaccctatgaactggggatgggggaagtattttctaatccaagtatcattaacctttacaacaggcctttgggcgccttccgctgcgtggcactcagtgtgtgagactctagattcc

SEQ ID NO: 444 - DNA, 2525 bp, Rattus norvegicus
tcaccctgcgggctcctccgcttcccggtcttgctttccctttggctctgtccccactgaggagtccgctgtcccagccatggcgcgtgctaccggacccgagcagcggctgctggccatctacactggcggcaccatcggcatgcggagtgaaggcggagtgctggtacctgggagaggcctggctgctgtcctgaggacacttcacatgctccacgatgaagagtatgccagagcccacagcctgcccgaggatacgctggtgttgcccccggccagttctgaccagaggatcatctacaaggtgctggagtgccagccactcttcgactccagtgacatgaccatcactgaatgggttcagattgcccaaacgatagagagacactacacacagtaccagggctttgtggtcatccacggcacggacaccatggcctttgctgcgtcagtgctctctttcatgctggaaaacctgcagaaaccggtcatcctcacaggtgcccaggttcctatccacgaactgtggagtgatggccgtgagaacctgctgggggctctgctcatggctggccagtacgtcatccctgaggtctgcctgttcttccagaatcagctctttcggggcaatcggacaaccaaggtggacgctcggagatttgcggccttctgctcccctaacctgccccctctagccactgtgggcgcagacgtaacaatcaaccgtgagctggtacggaaggccagttggaagagccacctggtggtccacagcaacatggagcctgatgtgggcctactgcgcctctaccctgggattcccgcctccctggtccggaccttcctccagcccccactgaagggcgtggtcatggagacctttggctccgggaatgggcccaccaagccggacctaatacaggagctccgggcggcggccgaaagaggcctgatcattgtcaactgtacccattgccttcagggggctgtgacttccgactatgcacctgggatggccatggcaggagccggcataatctcaggcttcgacatgacatcagaagctgccctggccaaactgtcctatgtgctgggccagccagggctgagcctgagtgacaggaagaagctgctggccaaggatcttcgcggggagatgacactgcctacaacagatgacttgctgggagatgacatgctgggctgcagggccacatggcttctcagtatgaatggcagccaggatgccgatgccatgaaggatgttctgctgcccggcctggccctggctgcagctcatgctggtgacctggacactctgcaggcctttgtggagctgggcagagacctcaacctgaaggactacagtggccagacgccactgcatgtggctgcacggagagggcatgcttcagtggtcgccatgctactgcagaagggtgtggatgtggatgcctgtaatgaggacggtcagagcccactgctgctggccgtgaggggcaggcatcagagtgtcatcaggctgctgagggccgctggggctcacctgtctccccaggagctggaggacgtggggacagagctgtgcaggctggcatcaagggcggacagcgaaggcctgcgggcgtggtggcaggctggggctgacctaggacagccggactatgatggacactgtgccctgcaagttgctgaagcagcagggaatgcagatgtggtggctctgctgcagagtcttgaggacagggtcagcgcccagccccagccccattagttcttgggctggtctgatgcctcctcagtgaactctcattggtttacgactggatcctggcaccagagccagttctggagacggctagaggaagtgggcataagagatgggtcattcgtccagagcccttcttggggaccccgagagtaaacacggtcttcgggagatagggctggtggggcttcgtgtagaagcccagctcagaccttcaccctacccagtctggagctgattgactggaaggacctaggcctgctcccagctgacatccatccccactgctctggagttttgaggcttggcggactatcctcaactcctgggactgcctggattccatacacaaggcttctggggtggagtacggggaggcctgccctggatgcatccctgtagtcctcggaagaccttgtttccaggaagtgctccttggcccccaacctgttgcagcaggagctgtgtcttactgcccgtgggacctcacgcacataccagcagactggctgctatgttagcaccattctagttggtgagacctcgaagctttcagaagccagctctgttctggccttgttatctcctgcagccaggtgtcccaggagctgactcagagctatggactcctcctccctaagttgcgggggcgggggggggggtcgtcttctgctaaactgcttcccagcctgttggcatgacaaatctggaggtctttgttgagtagaatgtcaataaagccatccggacagctgct

SEQ ID NO: 445 - DNA, 351 bp, Rattus norvegicus
gagatggaagacttccaggcctccgaggagactgcatttgttgtggatgaagtgagcaacattgtaaaggaggctatagaaagtgccatcggcggtaacgcctaccagcacagcaaagtcaaccagtggaccactaatgttgtagaacagactttgagccaactcaccaaactggggaaaccatttaaatacattgtgacctgtgtgatcatgcagaagaatggtgctgggttacacaccgcaagttcctgcttctgggacagctccacggacgggagctgcacagtccgatgggagaacaagaccatgtactgcatcgtcagtgccttcggactgtccatctgaccgcct

SEQ ID NO: 446 - DNA, 1572 bp, Rattus norvegicus
cgagatggaggcgactctgagcctggagcccgccggccgcagctgctgggatgagccgctgagcatcaccgtgcgcggcctggtccccgagcagcccgtcacgctgcgcgcggccctgcgcgacgagaagggcgcgctcttccgagcccgcgcgctctaccgcgccgatgcccacggagagctggacctggcgcgcgcgcccgctctggggggcagcttcacggggctcgagcccatggggctgatctgggccatggagcccgaacggcctttctggcgcttggtcaagcgcgacgtgcagacgcccttcgtggtggagctggaggtgctggacggacacgagcccgacggcgggcggctgctggcgcgggcggtgcacgagcgtcacttcatggctcccggggtgcggcgggtgcccgtgcgcgagggcagggtgcgcgccacgctcttcctgcccccagaacctgggccctttcctggaatcatagacctttttggagttggaggcggccttctggagtaccgggcgagtctgctggctgggaagggttttgccgtcatggctctggcttattacaactacgacgacctccccaagaccatggaaaccatgcgcattgagtactttgaagaagccgtgaactacctgcgtggccaccctgaggtaaaaggaccaggaattgggctgcttgggatttccaaagggggtgaacttggccttgctatggcctccttcctgaagggcatcacggctgctgttgtcatcaatggctccgtggctgctgttgggaacaccatatgctacaaggatgagactataccccctgtgactatcctgagaaaccaggtcaaaatgaccaaggatggcctcaaggatgttgtagatgctttgcaaagccctctggtagaacagaagagcttcatccctgtggaaaggtctgacacgaccttcctgttcctcgttggtcaggatgaccacaactggaagagcgagttctatgccaatgagatctccaaacgcttgcaggcccacgggaaagagaagccccagatcatctgctacccagaagcagggcactatatcgagcctccttacttcccactgtgcagcgctggcatgcacctcctggtgggtgctaacatcacctttggaggggagcctaagcctcactctgtggcccagttggatgcatggcagcaactccagactttcttccacaaacagttgggtggtaagagtcatggggtgtcccctaaaatataacctgttatgtgatggttttggcaggaaaagtacaaatactttgtaggaatatcagttcagattacttcatctgaacatataaccgcttttggtttacatttttaaaaattaattttagtatcaaaatagtgctgattcaaaggctggaaatatagttcagttgtagagtccttgactgactcatgcaagttcctgggttcaatctccgtgctgtaagggaaaagagcacattttatggaaactgtagctattcaagaaatagtgcctagaatttaaaggaaccatgagtaaacactcttatgtaactt

SEQ ID NO: 447 - DNA, 5174 bp, Rattus norvegicus
gggttgagctgaactgagatcccaagaccagcggtgcaccagagccacatggaccgcttgtgcggctccggggagctgggctccaagttctgggactccaacctgactgtatataccaacactccagacctcacaccctgtttccagaactccttgctggcctgggttccctgcatctatctgtgggctgccttgccctgctacctgttctacctgaggcaccatcggcttggctacatagtcctctcatgcttatccaggctcaagacggccctcggtgttctgctgtggtgtatctcatgggtggacctgttctactccttccatggcctggttcacggctcatcccctgctcctgtcttctttatcacacccttgttggtggggatcaccatgctgctggccacattgctaatccagtatgagcggcttcggggcgtgcggtcttcaggtgtgctcatcatcttctggctcctgtgtgtgatctgtgccatcatccccttccgttccaagatcctcttggctttggcagagggtaaaatcttggatccgttccgattcaccactttctacatctacttcgccctcgtgctgtgtgccttcatcctgtcctgcttccaggagaagccgcctttgttttccccagagaatcttgacacaaatccttgcccagaggccagcgctggcttcttctcccgtctgtctttctggtggttcacaaagcttgccatccttggctaccgacgtcccctggaggacagtgacctctggtctctgtctgaggaggactgctctcacaaggtggtacaacggctactggaagcatggcaaaagcagcagacccaagcatcagggccccagactgcagcccttgagccaaagatcgcaggtgaggatgaggtcctgctgaaggcccgccccaagaccaagaagccttcctttctgagggctttggtgagaaccttcacctccagcttgctcatgggtgcctgcttcaagctgatccaggacctgctctccttcatcaacccacagctgctcagcatcctcatcaggtttatttctgaccccacggcccctacctggtggggcttcttgctggccggactgatgttcgtgagctccaccatgcagacattgatcttacaccaacattaccactgcatctttgtgatggccttgaggatacggactgctatcataggcgtcatctacaggaaggctctgaccatcaccaactcagtcaaacgtgagtacactgtgggagaaatggtcaacctcatgtcggtggacgcccagcgcttcatggatgtctccccattcatcaacctgctgtggtctgcacctttgcaggtcatcctggcgatatacttcctctggcagatcttaggcccatcagccctggctggggtggctgtgatagtcttgctgataccactcaatggagctgtgtccatgaaaatgaagacctaccaggtacagcaaatgaagttcaaagactcccgcatcaaactgatgagtgagatcctgaatggcatcaaagttctgaagctgtacgcttgggagcccaccttcttggagcaggtagaaggaatcaggcagggtgagctccagctactgcggaagggcgcctacctgcaggctatctctaccttcatctgggtctgcaccccgtttatggtgaccctgatcaccctcggggtgtacgtgtgtgtggacaagaacaatgtgctggatgctgagaaggccttcgtgtccctgtccttgttcaatatcttaaagatccccctcaacctgctgcctcagttaatcagtggcatgacccagaccagcgtgtctctgaaacggatccaggatttcctgaaccaagatgaacttgacccccagtgtgtggaaagaaagaccatctccccaggccgtgccatcaccatacacaacggcaccttctcctggtccaaggacctgcctcccacccttcacagcctaaacattcaaatcccgaagggggcattggtggctgtggtgggacctgtgggctgtgggaagtcttccctggtgtctgccttgctcggagagatggagaagctggaaggtgcagtgtctgtaaagggctctgtggcctacgtgccccagcaggcgtggatccagaactgcacacttcaggaaaatgtgctatttggccaacccatgaaccccaagcgctaccaacaggctctggagacgtgtgccctgctagctgacctagatgtgcttcctggtggggaccagacagagattggagagaagggcattaacctatctggaggccagcgacaacgggtgagtttggcccgagctgtttatagtgacgccaacatttttttgctggatgacccactgtcggctgtggactctcacgtggctaagcatatcttcgaccaagtgattggaccagaaggtgtgctggcaggcaagactcgggtgctggtaacccatggcatcagcttcctgccccagacggactttatcattgtgcttgctgacggacagattactgagatgggtcactactccgaactcctgcagcacgatggctcctttgccaacttcctccgaaactatgcaccagatgaaaaccaggaggccaatgaaggagtcttgcaacatgcaaatgaggaggtgctcctgcttgaagacacactcagcacccacacagacctgacagacaccgagccagccatatacgaggtccgcaagcagttcatgagagagatgagctccttgtcttctgaaggagagggccagaaccggcctgtgctcaagagatatacgagttcactggagaaggaggtgccggcgacacagactaaagagactggtgcattaatcaaagaggagatcgcagagacaggcaatgtgaagctgagcgtgtactgggattatgccaagtctgtggggctctgcaccacgctgtttatctgcctcctgtatgctggccaaaatgcggttgctatcggagccaatgtgtggctcagtgcctggaccaatgatgtggaggaacatggccagcagaacaacacctccgtaaggctgggagtctacgccaccctaggaatactgcaagggctcctggtcatgctgtcggccttcaccatggtggttggcgctatccaggctgcccgcctgctgcacacagctctgttgcacaaccagatccgtgcgcctcagtccttctttgacacgacgccctcaggccgcatcctcaatcgtttctccaaggacatatacgtcatcgatgaggttctggcccccaccatcctcatgctgttcaattcattctacacatccatctccaccattgtggtcatcgtggccagcacgccactcttctgcgtggttgttcttcctctggctgtgttctatggcttcgtgcagcgcttctatgtggccacatcgaggcagctgaagagactggaatccgttagccgctcgcccatcttctcccacttctcggagacagtaactggcaccagtgtcattcgggcctacggccgagtccaagacttcaaggtcctcagtgatgctaaggtggatagcaaccagaagaccacttatccttacatcgcctccaaccggtggctgggtgtccacgtggagtttgtggggaactgcgtggtgctcttctccgcgctgtttgcagtgatcgggagaaacagcttgaatccagggcttgtgggtctttccgtgtcctatgccttacaggtgaccttgagtttgaattggatgatacggacgctatccgacctggagtctaatatcatagccgtggagagagtcaaggagtactctaagacggagactgaggctccctgggtgttggagagcaaccgtgctccagaaggctggcccaggagtggggtggtagagttccggaactattcggtgcggtaccgcccgggcctcgagttggtgctgaagaatttgactctgcatgtgcagggtggggagaaggtaggcatcgtgggccgcactggggctggcaaatcttccatgactctttgcctattccgaatcctggaggccgcagagggtgagatcttcattgacgggctcaatgtggcacacattggcctccatgacctgcgttcacaactcaccatcatccctcaggaccccatcctgttctcgggcacgctgcgcatgaacctcgatccctttggccgttactcggacgaggacatctggaggaccctggagctatcccacctgagtgcatttgtgagcagccagccgacaggcctggattttcagtgctctgagggtggggataatctcagtgttggccagaggcagctcgtgtgcctagcccgagccctgctccgaaagagccgtgtcctggttttagacgaggccaccgctgccattgacctggagactgatgacctcatccagggtaccatccgtacccagtttgaagactgcactgtactgaccatcgcccaccggctcaacacaatcatggactacaaccgggtcctggtcttggacaaaggagtagtagctgaatttgattctccagtaaacctcattgcagctggaggcatcttctatgggatggccaaagatgcaggactcgcctagaatctgcattccaaaggtttcttccttgtctgaatcggacagcaagtagctgcagcatggatttgatggcaacgagtggggacatttgagttggttttggtttttttttgttttttgttttttttttttttttaaattctgcaaattgccttacagactagccatacttaacagtggaatgaggaagtgggtccttggaggtcacagccagttcacagccaagttcagaccagtccctgggtctcctagacctagtctaccattattcccgtactgcatttttttttggttctttttttcagagctggggaccgaacccagggccttgcccttcctaggtaagcgctctaccactgagctaaatccccagcccccgtactgcagtttttaagagaccctgctcctgcctctacatattcatagtttccaattttttttttaaatgagcctttctccttctggaccagggactgctaggtcagtctgtccggggaacagaatccctggttggtgctgtctgaatccactgacgaaataaagccatgagcagcagc

SEQ ID NO: 448 - DNA, 1902 bp, Rattus norvegicus
tagcccgacgaactgagaactggccatggcacggaaacaaccacatagctggctgaatgctgtgctctttgggctcctgcttattcttatccatgtgtggggtcaggactcaccagagtccagctccatcaggaccacacacacgggccaggtccgaggaaagcttgaccacgtgagggacactaaagctggtgtccacaccttcctgggaattccctttgccaaggctcctgtaggaccgctgcgctttgcacctcctgaggaccctgagccatggagtggtgtgagagatgggacctcacatccggccatgtgtctgcaaaatattgatatgctggatgaagtaggcctgacagatatgaaaatgatactgtcttccattcctatgtctgaggactgcctgtatctcaacatctatacaccagcccatgcccatgagggctctaacctgcctgtgatggtgtgcatccacggaggtgcactggttataggaatggcttccatgtgtgatggatctctattggcagtcaatgaggacttggtggttgtcgctatccagtatcgtctgggtgtcctgggctttttcagcactggagatgagcatgccagaggcaactggggatacctggaccaagtggctgccctgcgatgggtccagcagaatatcgcccattttggaggcaaccctaaccgggtcactatttttggcgtgtctgcaggtggcacaagtgtgtcttcacatgttatatcccccatgtctcaagggctcttccatggtgccatcatggagagtggagtggccctgctgcctgaccttatctctgaaacctctgagacggtctccactacagtggccaagctctctggatgtgaggccacggactcagagaccctggtgcgctgcctgagagccaagagtggagcagagattctggtcattaacaaggtcttcaagatgattcccgctgtggtggatggagagttcctacccaggcatcccaaagagctgttggcatctgaggattttcgccctgtccccagcatcattggtgttaacactgatgagtactgttgcaccattcctatggtcatgggcactgctcaaataataaaggagctatccagagagaacctgcaggctgttctaaaggatacagcagcacaaatgatgcttcctcctgagtgtggtgacctgctaatggaagagtacatggggaatactgatgatccccagaccctacaaatacagtacgctgagatgatgggagacttcctgtttgtgatccctgcactccaagttgcacactttcaacgttcccatgcccctgtctacttctatgagttccaacatgcacccagctatttcaagaatgtcaggccaccccacgtgaaggctgaccatgctgatgaggttccttttgtctttgggtccttcttctggggcataaaagttgacttcactgaggaggagaagctgctgagtaggcggatgatgaagtactgggccaattttgcaagacacgggaaccccaacagcgagggtctaccctactggcctgtgttggaccacgacgagcagtacctgcagttggacacccagcctgctgtggaccgagccctgaaggccagaaggctgcagttctggaccaagactctgccccagaagatccaggagctaaatggagctcagaaaaaccatgcagagctgtagtgtctggtgaaaggaacagagtgtgggagtgagggcaggtgggatcattctgagtttcaaagtctaattttctgttccaacacgcagaatcctttccaaccccaatattttccctttctgacatgaatgagaagccctccgtgtgttactctttattcttctgggcaaaatttaattggactcaataaaga

SEQ ID NO: 449 - DNA, 2346 bp, Rattus norvegicus
ctcgcatctctctgcagcagcctccggggctacgttccatcctatcagtctgagaccagcccagaagaaaaaaaccaaaaatccttaattatcttcttttgctcggtacctacattgggaccatcaaaaaaaaattattacagtaaaccgtagccatgagggaaatcgtgcacatccaggccggacagtgtggcaaccagatcggtgctaagttctgggaggtgataagcgatgaacacggcatcgaccccaccggcacctaccacggagacagcgacttgcagctggaccgaatctctgtgtactacaatgaagctacaggtggcaagtatgtccctcgagctatcttagtggatctagaacccgggactatggactccgttcgctcaggtccttttggccagatcttcagaccggacaactttgtttttggtcagtctggggcaggcaacaactgggctaagggtcactacacagagggagctgagctggttgactctgtcttggatgtggtgcggaaggaggcggagagctgtgactgcctgcaaggctttcagctgacccactcgctgggtggaggcacgggctctggcatgggcaccctgctcatcagcaagattcgagaagaataccccgaccgcatcatgaacaccttcagcgtggtgccctcacccaaagtgtctgacaccgtggttgagccctacaacgccaccctgtccgtccaccagttggtagagaacacagatgagacctactgcattgacaacgaggctctctacgacatctgcttccgtacccttaagctcaccacgccaacctacggagacctgaaccatctcgtctctgccaccatgagcggtgtcaccacctgcctccgtttcccgggccagctgaacgccgaccttcggaagctggctgtcaacatggtgcccttcccgcgtctccacttcttcatgcctggctttgcccctctcaccagccgtggaagccagcagtaccgggccctcactgtgcctgaactcacccagcaggtcttcgacgccaagaacatgatggccgcctgtgacccacgccacggccggtacctcacggttgcggctgtcttccgtggacggatgtccatgaaggaggtagatgagcaaatgctcaacgtgcagaataagaatagcagctacttcgtggaatggatccccaacaacgtcaagacggctgtctgtgacatcccaccgcgaggcctcaagatggcagtcaccttcatcggaaacagcacggccatccaggagctcttcaagcgcatctctgagcagtttacggcaatgttccgtcggaaggctttcctccactggtacacgggtgagggcatggacgagatggagttcaccgaagctgagagcaacatgaatgacctcgtctctgagtatcagcagtaccaggacgccaccgcagaagaggaagaggatttcggagaggaggcagaagaagaggcctaaggcggaagccctgcgtcacctcaggctgcttagttcccttagcttttttccaactgccctttgtttctttctgctgcctctgtcctgtttttgttccgttttgttttctcattggggggtaaacggtgcctggcacgtggcaggcgctcaataaatatttctttgtggaatgtctcctttctctttccgatctgacattctgagcgttaaccctgtgcttcctcctggtacccatttctttattatgactgtccagttaatattcttccaatatattctccaggaaccagcgttcggctccagacccggggtagaacccagcccagttctaagaactcaagagagtagccaccatcttaaagcaaagtagcgggtggggaaaaggtgggtagaggagatgctacttagggggtgggattttccagtcagggccatttagacacgggaatcgctggggctttcagtcgatggggctttcttttttccctgcttcatctctcggcctcaggagaggtattaacagtattatcaccatttatatcctagctgtcctgagccaaatctgccattggaggtgtcttcccctgtgttggttctccaagggacgttgtatggggatttgtgggggcagggcagcaaggccttgttctctaaatgtccagaaacactctaattaccatttccacctgggtgcctcacacactccccagaggggaggtaacatctctgccccatttccatcctgttccttggcttggtcattccctacctttctattttctgttaaacttggctttttttttttcatattgaaaagatgacattgccccgagagccaaaaataaatgggaattgg

SEQ ID NO: 450 - DNA, 2743 bp, Rattus norvegicus
cgcgcctgtaacgttcgcccgtgcacgcccggcccgccagctgtccgcctgctcgcacgccgccgtccgccgcagtccgcgcccagccttgcccgctctccccctccttcggcccacgcccggctccggccatgctgtccttccagtaccctgacgtgtaccgcgacgagacctcagtacaggattatcatggacataaaatttgcgacccttatgcttggcttgaagacccagacagtgaacagacaaaggctttcgtggaggcacagaacaagatcacagtgccgtttcttgagcagtgtccaatcagaggtctatacaaggagaggatgactgagctgtatgactaccccaagtacagctgccacttcaagaaaggaaagcggtatttttatttttacaatacaggtttgcagaaccagcgagtattatatgtacaggactccttagagggggaagccagagtgttcctggatcccaacactctgtcggatgacggcacggtggcactccgaggttatgccttcagcgaagatggtgaatacttcgcctatggtctgagcgccagcggctcagactgggtgaccatcaagttcatgaaggtcgacggtgccaaagagcttcccgacgtgctggagagagtcaagttcacctgtatggcctggacgcacgatggcaaaggaatgttctacaactcatacccacagcaggacggcaagagcgacggcacagagacgtccaccaatctccaccagaagctctgttatcacgtcttggggacggatcagtcagaagacgttctgtgtgccgagttccccgatgagcctaaatggatgggaggagccgagttatccgatgacggtcgctatgtcttgttatcgatctgggagggatgtgatccagtgaatcggctgtggtactgtgacctccagcagggatccaatggtatcaacgggatcctgaagtgggtaaaactgatagacaactttgaaggggagtacgattacataaccaacgagggtacggtgttcaccttcaagaccaaccgcaactcccccaattaccggctgatcaacatcgacttcacggaccccgacgagtccaagtggaaagttctcgttccggagcacgagaaagatgtcttagagtgggtggcttgcgtcaggtccaacttcctggtcttgtgctacctccgcaacgtgaagaacattctgcagcttcacgacctgacaactggtgctctcctcaagaccttcccgctggacgtgggcagcgtggtggggtacagtgggcgcaagaaggactctgagatcttctaccagttcacatccttcttatctccaggtgtcatttaccactgtgatcttaccagagaggaactggaaccccgggttttccgagaggtgacggtgaagggaatcgatgcgtctgattaccagactatccaggttttctaccctagcaaggatggcacaaagattcccatgtttattgtgcataaaaagggcataaagttggatggctcgcatcccgctttcctgtatggctatggtggcttcaacatctccatcacacccaactacagtgtgtccaggctcatttttgtgagacatatgggcggcgtcctcgcggtagctaacatcagaggcggtggtgaatacggagaaacatggcataaaggtgggatcttggccaacaagcagaactgctttgatgacttccagtgtgctgctgagtacctcatcaaggaaggctacacaacttccaagaggctcacgatcaatggaggctccaatggcggcctcttagtggctgcttgcgcaaatcagcgcccggacctcttcggctgtgtgatcgcccaggttggagtgatggacatgttgaagttccacaaatttactattggccatgcctggaccactgattacgggtgctccgacagcaaacaacacttcgaatggcttctcaagtactcgccgctgcacaacgtgaagcttccggaggcggatgacatccagtacccgtccatgctcctcctcacggctgaccacgacgaccgcgtggtcccgctgcactcgctcaagttcatcgccacgcttcagtacatcgtgggccgcagccggaagcagagcaaccccctgctcatccacgtggacaccaaggccggccacgggccgggaaaacccaccgccaaggtgatagaagaagtctcggatatgtttgcgttcatagcgcggtgcctgaacatcgagtggatccagtaagtggggattcccggcccctcccaccagacacagaaaacctcaagggctttttcacaccatcctgaccaagaaaccaccggcgaacgctgcctggagtgagcaccgtgccgctgctcacagacagcaagccgccgagcaggactgccaccgggattttagcttttctatctcctttctagcaagcccttgatgttttggttttgttttgttttgttttccccactctctccaggcacatatattgaaagggggggaaagggagggtatgtttatataagaaactaaatggcagtgaacgtattgtgaatatcagagccctgaactcgtaaagggatctaagttaagggtcatagttgggcatactcatctataatagcataatgaagtcacgtctctaaccatagcatataaccttaaataagtgggagacctcaaggcagagtccgctgcattactaataaatgctactgaagagtggg

SEQ ID NO: 451 - DNA, 2454 bp, Rattus norvegicus
gacggaggcagctgaatgtggtgctgaaccaacaacatctagctacaaggggagccactcctccacccagcgactgtgactgttctcacaggtctgaatttcctgttggtattcacaaagatgctttttatttttaacttcttgttttccccacttccgaccccggccctgatctgcctcctgacatttggaacggctatcttcctgtggctgatcaacagacctcagccagtcttacctctcattgacttggacaaccagtctgtagggattgagggaggagcacggagaggcgctttccagaagaacaatgacctaatcctttattacttctcagacgccaagacgttgtatgaagttttccaaagaggacttgctgtgtctgacaatggaccttgcttgggatacagaaagccgaaccagccctacaagtggatatcctacaagcaggtgtctgatcgagcagagtacctgggctcctgtcttttgcataaaggatacaagccatcgcaggaccaatttattggcatctttgctcaaaataggccagagtgggtcatctccgagttagcctgttacacatattccatggtagctgtccccctgtatgacacactgggagcagaagccatcatctatgtcatcaacagagctgatatctccgtggtgatctgtgatacaccccaaaaagcaacaatgctgatagaaaatgtggaaaaggaccttaccccaggcctgaagacagtcatcctcatggaccctttcgatgatgacctgatgaaacgaggagagaagtgtggcattgagatgttgtctctgcatgatgctgagaatctaggcaaagagaacttcaaaaaaccaatgcctccgaacccagaggatctaagtgttatctgtttcaccagtggaactacaggtgaccccaaaggagctatgctgacccatcaaaatatcgtttcaaacatggctgctttcctcaaatttctggagcctatcttccagcccacccccgaggatgtgaccatatcctaccttcccttggcccatatgtttgagaggcttgtccagggtgtcatattttcctgtggaggcaaaattgggttcttccaaggagatatccggttgctacctgatgacatgaaggctttgaaacccacagtgtttcccacagtgcctcgactccttaacagggtctatgataaggtacaaaatgaagccaagacacctttgaaaaagttcttattgaacttggctatcatcagcaaattcaacgaagtgagaaatggcatcattcggcggaacagtttgtgggacaagctcgtgttttcaaagatccaaagcagcctgggtgggaaggttcgtctcatgatcactggagccgcccctatctccactccagtcttgacgttcttcagggctgcaatgggatgctgggtgtttgaagcttacggccaaacagaatgcacagctgggtgttccattacatcacctggggactggacagcaggtcatgttgggactccggtgtcctgcaattttgtcaagctggaagatgtggctgacatgaactacttttcagtaaacaacgaaggcgagatctgcatcaaaggcaacaatgtgttcaaaggctacctaaaggacccagagaagacacaggaagtactggacaaggatggctggcttcacactggggacatcggtcgctggcttccaaatggaactctgaaaatcattgaccggaagaagaatattttcaaattggcacaaggagaatacatcgctccagagaagattgaaaatgtttattccaggagcagaccaatattgcaagtttttgtccatggggagagcttacggtcattcctgataggagtggtggttcctgacccagagtcacttccctcatttgcagccaagatcggggtaaagggatcctttgaagaactatgccaaaaccagtgtgtaaagaaagccattttagaagatttgcagaaagttgggaaagaaggtggccttaaatcctttgagcaggtcaagagcatctttgtgcatccggagccgttctcaattgaaaacgggcttctgacaccgacactgaaagccaaacgagtggagcttgccaagttcttccagacacaaatcaagagcctctatgagagcatcgaagagtaacttaaggttgctgagctggaagcggtgggggacgaagcggaaactatgtccagcgaacttttccagtaaatgaagcaatcactaaaggactgtcctgagttgggagcaaagcaacgtggacgagctcgatgtgacgcctgcactgcaggcgtcttctgtgatggaagctctggatctttctccttggacttcagtccctgcagtattttgctgccagatagcatgtggtgcctctacctgtaaatgtcagatctttgaaataaactattacagctcgtgccg

SEQ ID NO: 452 - DNA, 1219 bp, Rattus norvegicus
gatgctcttcaactccttccaggtgggtggcctgcttgaggtcctggggaacagggcagcagtgagatgtggtcctgaatgcgtgtgcctctctccacagggattttttgttgccatcatatactgtttctgcaatggtgaggtaagcaagggtgagggaggtagtaggagcaggcaggggtgaggtggtaggagcgggcaggggtgaggtggtaggagcaggcaggggtgaggtggtaggagcgggcaggggtgagatggtaggagcgggcaggggtgaggtggtaggagtgggcaggggtaaggtggtaggagcgggcagggctgaggtggtaggagcgggcaggggtgaggtgataagagaaggcaggggtgaggtggtaggagccggcagggttcctctagccctgtccctccatcctctcccctgccctcattctttctttgcttctcaagaaccttcctgaccaggttgtggaggtaaagagaaggattcaaagatgactcaggcgcagaatggactgggacgtgtgggctcttcctcagtcccagagaggaagatttttagaactcagtctgagggctcagccgtctttggggcatttgagttttttgattttggctgtgcccctttctgttttctggggactgagctcagattcaccttgagctttttcagtaggtctcctaccatcgatgcagggatggtggcagggaaacctggccaaggggttaagggcacacctgactgccacccatctatctctacaaggtgcaggcagagattaggaagtcatggagccgctggacactggcgttggacttcaagcgcaaagcacgaagtgggagtagcagctacagctatggcccaatggtgtctcacacgagtgtgaccaatgtgggcccccgtgcaggactcagcctccccctcagcccccgcctgcctcctgccactaccaatggccactcccagctgcctggccatgccaagccaggggctccagccactgagactgaaaccctaccagtcactatggcggttcccaaggacgatggattccttaacggctcctgctcaggcctggatgaggaggcctccgggtctgcgcggccgcctccattgttgcaggaagaatgggaaacagtcatgtgactgggcactagggggctagactgctggcctgggcacatggacagatggaccaagaagccagtgttt

SEQ ID NO: 453 - DNA, 2389 bp, Rattus norvegicus
agcagtcgagctggagctgagccatagtcaaggactcattgtgggtgcccatcatgatgtcctacagcgagagattggggggaccggctgtctccccacttccagtccgtgggagacacatggtgcatggggcagcctttgcttatgtccccagcccacaagtcctgcacaggattcctgggacaaccacctatgccatctccagtctgagcccggtagccctcacagagcacagctgtccctatggggaggtcctggaatgtcatgacccgctccctgccaagctggcccaggaagaggagcaaaagccagagcccaggctgtcccagaagcttgcccaggttggcacaaagctcctgaaggtgccgttgatgctaggcttcctttacctctttgtctgctccctggacgtgctcagctctgccttccaactggccggagggaaagtggctggggacatcttcaaggacaatgccatcctgtccaacccagtggcagggctggtggtgggaatcctggtgacagttctggtgcagagctccagcacctcgacatccatcattgtcagcatggtctccttcggcttgttggaggtgagctccgccattccgataatcatgggctccaacatcgggacctctgtcaccaacaccattgtggccctgatgcaggcgggggacaggactgacttcaggcgggcttttgcaggggcaacagtgcatgactgctttaactggctgtctgttctggtcctgctgcccctggaggctgccacgggctacctgcaccacgtcaccgggcttgtggttgcctccttcaacatccgtggtggccgtgatgcccctgaccttctcaaggttatcacagagcccttcacaaagcttatcatccagctggacaagtctgtgattaccagcattgccgtgggggatgagtccctgaggaatcacagtctcattcggatttggtgtcaaccagagacaaaagaggtgagttcagagccaggtaagacgataccctctttagaggtttgcctgtttgttccagagaccttggacatcacttagatgcgctggcgattcttctgcatctgtgtagccatggcgagcgttcgttggtaatccctcctggctgccatgctggccataggcaaacatcatctgtacgtttagcattgcatgtaattgatctggcccagtggctttcaaagagctgttgttccccagactaaccgcatcaatactacctaggaacctattagaggtgtaaactagatacagattagaagaaaacccactgcttagtccatatgcgtccttcctagaatggttggatcagaaaagaacaaaaaacaaaagacccttgggaatgagcccagttgcttagtctccaacctgccctctaactgctccgtgctcaagtttggaaaccatggatcaagctcaacccttcggtttcatggacagagacacaggcccaaggaggctaacttgcctgggactaccctgctgcagggacacttggggctagtcactggagtctgccatgtttgcagcttgaggtttaagcaaggtggagaggagggagaagagagtgctagaaggatattgagaagcttggatcctaggactccagccaaggagcaagtcagtggctgccacattggatgtgacactccctggctctcagggatggccccctgagagacacagcagtcactggtgctgacaaggggcactttcacagggagccacaagttcattttttctgctcagaatgaggaactatcgggattggctgggccttcgtggatcagccattatgcctatggtaccaggcacaatagcaaggcggttaggcacgaggaagtaggcaattagcacactttctgactcagccataaaagggaaaacgcttcaccaaaccacagtcttccaaatttgcttctccttaattattgcatacatgaaatcgctccgtgtagaaaagctgcggggaaatcagaagcccacagcagaggcacgggcccactccccacccccacccccgccttccctcctctttgccgtggatgttccggtccttacccagcactcgcagaaaacactctgtcagctcacccctcggtgttctttgcatccaagtggcacacggcatcaatgccaccttctgagagttctgctctgctgagagttcaaggcagcctgacaacaaaaagcccacgtggacagctttgatgctggctttgtgatcttcccgtcagccaccttctcatgagctctctggcactctcgggcaagctctgtgagtcactgcagcctcagaaagcacagtctggagagaggaaagaaagacattctgatctaaaaaaaaaaaaaaaaaggatcgc

SEQ ID NO: 454 - DNA, 1961 bp, Rattus norvegicus
ctcactatagggcgaattgggtaccaagggtcccggagtagccagggcaggtcagtgacggggtagaatgtgtatgtacgaggccatattcctgaggtatttcgacctcatcttttctacataggatgtaggctcagagcgggcaagcaacaggtccatgatcacagagccagaaatgcattctggtccttccatttctccggaacctccctcttagctccgcccccaggctgtgattttttttctagattctctaagtcaccttcctctgaatttaggcttccacttctatgtccagggtagaggccattggcagccttgcaaacaccaccatggagaaatgtaagtatctctaacatgggaggtaacccacatgacagccctgcacagccgtgccctggctggccgctgctctgtccagccccgggaaaagcagctgacctctgggcttatagcagggcctggtgcagaggctgaagaagcttgaggtggggcgtcttaagctcacagcccagtgggttgggaaaggtgggaggcaggtgtagggtaaacactcctgataccacccttttaggcaaccatatcttcgtggatactgggctgcccgacctggccgtggggctcattctgctggcgggctccctggtggtcctgtgcacttgtcttatcctcctcgtcaagatgctcaactctctgctgaagggccaagtggccaatgtcatccagaaggtcatcaacacagacttcccagcccccttcacttgggtcacaggctactttgccatggtggtgggcgccagcatgacgtttgttgtccagagcagttccgtgttcacctcagccatcactccgctcattggcctgggtgtgatcagtattgagcgggcctaccctctcaccctgggctccaacattggtaccaccactacagccatcctggcagcactggccagccccagggagaagctctccagctcctttcagattgccctctgccacttcttcttcaacatctcgggcatcctcctgtggtacccgctgccctgcacacgtctgcccatccgcatggccaaggcactgggcaaacgcactgccaagtaccgctggtttgccgtcctctacctcctcgtgtgcttcctgctcctgccctcactggtgtttggcatttctatggcaggctggcaggctatggtcggcttgggcacaccctttggggccctgctcgccttcgtggtgcttgttaacgtcctgcagagtcgaagtcccgggcacctccccaagtggctgcagacatgggacttcctaccccgctggatgcactctctgcagcccctggatggccttatcacaagagccaccttgtgctatgccaggcccgagccccgttcaccccaacttccccccagagtcttcctggaggagcttcctcctgccacgccctctccccgcctggcactgcccgctcaccacaatgccacccggctctaggctgcaggtccagactattgcctggaggcgagggacgggatttttacagagcccacagtagaaaggcacagcatgtttgtgagtgtgtgtgcatgcatgtagatgcatgtcacttgaggtacatgattttgtgccacccttgggtacctgtccctactcagggccacagcggggtgggctttttttgcaattaagaagcagtgtgcacaaattacatgctaggtcctgagcctttgtggccatcaggacaggagtatgcgagtgcatggtgtgggtacaggggatgcagatgcatgaggagcccccaaaattttctgggaagagtcggctatgccctctcaccttctcactacccttgtcccaacaggagaggcagaagagcagctggccttctgtatacatgagcctttcctctgccaattctgctaactgtgcatagaaaaagttttaaaagttgcatctgtcctgatcat

SEQ ID NO: 455 - DNA, 2318 bp, Rattus norvegicus
ggagcggcgggcggagaggtgtgtggagcttgtggcttgggaggaaggcgctgtccgagagaacgtgatctgcgcggccgctgtgtcctggccttggaagtggttcagtcatggttgagatcaagaagatctgttgcattggtgcgggctacgtcggcggacccacatgcagtgtcattgctcgcatgtgccctgaaatcagggtaacggttgtggatgtcaatgaggccaggatcaatgcatggaattctccaacgcttcctatttatgagcctggactaaaagaagtagtcgaatcctgtcgagggaaaaacctctttttttctaccaatattgatgatgccatcagagaagccgatctagtgtttatttctgtgaacacaccaacaaaaacatatggaatgggaaaaggccgggcggcagatctgaagtatatcgaagcttgtgctcgccgcattgtgcagaactcaaatgggtacaaaattgtgactgagaaaagcacagtccctgtgcgggcagcggaaagcatccgccgcatatttgatgccaacacaaagcccaacttgaatctacaggttctgtccaatcctgagttcttggcagagggaacagccatcaaggacctaaagaacccagacagagtcctgattggaggggatgagaccccagagggccagagagctgttcaggcactctgtgctgtgtacgagcactgggttcccaaggaaaagatcctcaccaccaacacttggtcctcagagctttccaaactggcagccaatgcttttcttgcccagaggatcagcagcattaactccataagtgctctgtgtgaaagcacaggcgccgatgtggaagaggtggcaacggctatcgggatggaccaaagaattggaaataagtttctaaaagccagcgttggttttggtgggggctgcttccaaaaagatgttctgaatttggtttatctctgtgaggctctgaatctgcccgaagtagctcgttactggcagcaggtcatagacatgaatgactaccagaggaggaggtttgcatcacggatcatagacagcctgtttaatacagtgactgataagaagatagctatcttggggtttgcgttcaaaaaggatactggtgataccagggagtcctccagtatctacattagcaaatacctgatggacgagggtgcgcacctccacatctacgaccccaaagtacccagggagcagatagtggtggatctttctcatccaggcgtctcagcggatgaccaagtgtccagactggtgaccatttccaaggatccatatgaagcatgtgatggcgcccatgccctcgttatctgcacagagtgggacatgtttaaggaactggattatgaacggattcataaaagaatgctgaagccagccttcatatttgatggccggcgtgtcctggatgggctccacaatgagctacagaccattggcttccagattgaaacaattggcaaaaaggtatcttccaagagaattccatacactcctggtgaaattccaaagtttagtcttcaggatccacctaacaagaagcccaaagtctagacgtcgcccttttgcctgtgatgatttggtactgcagggtagccagcgtctgtctgatactaagtggtaaatgaactacgtgtttttatggaaacaaaaatatttttgtaatcatcaaatttatactagctatctgggtgttagcatatctagtaattatgagtctagaataatttttatatatttttatattattgtactctcagttactgaatggatggaaaacaatcatgttggtttaaatgtcagtttttataaataaaaatgaaaccttgaattttttagcattacaggttgttacagactgcactgtaataacacaagggaaaggcagtctcatttccctacctgttgtctctgcttatcactaaatgggacttcgaagccgtgaaatcactgtgctaggatggctgatgaaggtctctggacttttgttttaatgagattatgtcattagtggttttagttgtctttgtgtctcccaaaaccactctgtctttctctccatgcgtaactcgggcagtgctttcttttttgaaaattcagcctgaggaggaaatcagtctatggtctagttcgtcctgcctcttagcttctgtacctgcttgtcacatttgcacctatgagtcaagatatgtttgttacctttattttgatttatttctattacaattcaatttttttcctttaattaagaaaaccaataaagtctcatgtgtaaactgg

SEQ ID NO: 456 - DNA, 897 bp, Rattus norvegicus
cggcacgaggacgagagcacccgggaagagtcggcgccgctagtgccgggaccaggagcctccgcgagcaagatggccgctcccgagaccgaggccagggggcaggggtactaagtccggacccgcgtgcccttctcccggccgcctgcgccctcatcaagacctcgcgcttctagccaagacatctacatggattattctcgccgtggtcacgaggccgttccaatagagctctagttggcccagattgagaactctggcatttggctgctctgagctggaacctccgggaggtctgctgcaacaggtgcgaccctgaccgctccatgctcgtgggcgcggggaggcgtggcctcccccggggcggccacctctgttggttgctgtgcgctttcaccttaaagctctgcgaagcagaggccccggtgcgcgaggagaagctatcagtgagcacatcaacttcaccatgttggttggtagaagagtttgtggtgaccgaagagtgtactccgtgttctaacttccagattaaaacgacacctgagtgtggttctacagggtatgtggagaaaatcacatgcagctcatctaagaggaatgaattcaaaagctgccgttcagctcttctggaacaacacttattttggaagtttgaaggcatcgtggtgggggtagctttagtcttcgcttgccttgtcatcattcgtcagcgacagctggacagaaaggctcttgaaaaagtccggaagcaaattgaatccatatagctgaatctgctgtgtatggtgggtcccacggatgcatctcagatggagaaagttcagggctaatgtgccctcataagccttgtggtagtgcatcttcaatgactcctcttccaggccattaatgagcaca

SEQ ID NO: 457 - DNA, 3061 bp, Rattus norvegicus
tgtgaccgcggccaagcccgctcgccttctgcggcgagtagggcctcgcggcgtcatcggcggcgaggagccgctgcggcctggccgaccatgtcggacgcggctgaggagcagcccatggagacgacgggcgccaccgagaacggacacgaggccgcccccgaaggcgaggccccggtcgagcctagccctggcagcggccccgcgactccggcggggtctgtgggcgggaccacggccgccccgagcgggaaccagaacggcgccgaaggcgaccagatcaacgccagcaagaacgaggaggacgcgggaaaaatgttcgttggtggtctgagctgggataccagcaaaaaagatctaaaggattattttactaagtttggagaggtcgttgactgtacaataaaaatggatccgaacactggtcgatcaagagggtttgggtttattctcttcaaagattcttctagtgtggagaaggtcttagatcagaaggagcacagactggatggtcgtgtcattgaccctaaaaaggctatggctatgaagaaggaccctgtgaagaaaatctttgtgggaggtctaaaccctgaagccacagaggaaaagatcagagaatactttggccagtttggggagattgaggccattgaacttccaatagatcccaagttgaacaaaagacggggttttgtttttattacatttaaagaggaagaccctgtgaagaaagttctggagaaaaaattccatactgtcagtggtagcaagtgtgaaatcaaggttgcccagcccaaagaggtgtaccagcaacagcagtatggctctgggggccgaggaaatcgcaatcgagggaaccgaggcagtggtggaggtcagagtcagagttggaatcagggctacggcaactactggaaccagggctacggctaccagcagggctacgggccgggctatggcggctacgactactcgccctatggctattacggctacggccccggctacgactacagtcagggtagtacaaattacgggaagagccagcgacgtggtggtcatcagaataactacaagccatactgagaggcagcaggagcggccgagtgacgacgcacacgctttgtttggacgcggagtgaacacaattatgtaccaaatttaacttggcaaacttttatggcctgtcccatgtgcatcttatttaaaatttcccccggaaatcactctcctgtttactattccagagctctagttgttgtaggcagcgtgtggcgtctcagaggtcagagcggcattagggggctgattttattaccaggttaccctgttctagattggagggtctgcttcctgctgccgctctgcagcctggacctgtggaccctggttgtaaagagtaaactgtatcttaggaaaccagtgtcacctttttcaccttttaattttatattatttgtgtcatacatttccagtaatggaagtgttaattttactgtactttttggtaccttttgggaatctaatgtattgtaaggtattttacacgtgtcctgattttgccacgacctggatattgaagctatccaagcttttgaaataaaaatccctgagagtctggtccactaactccagggactgtgggacagaggaacaaacaagaaagaactcgaggcctcgctgagtggcacgcttgctgagtgctgccacatcccgcaagctgagcaggtatcccaactctgttcctgcccggtagaccacccgaggtgtgagtgtggtcttgtcttccagattcgtaggacagaagctccaggaggaggacccgcccaacatggcatcggagagcgggaagctatggggtggccgatttgcaggctcggtcgaccccaccatggacaagttcaactcatctatcgcctatgaccggcatctgtggaatgtggacctgcagggaagcaaggcctacagcaggggcctggagaaggcagggcttcttcaccaaagctgagatgcagcagatactgcaaggcctggacaaggtggctgaagagtgggcccaaggcatcttcaaattgtaccctaatgatgaagacatccaccttcctcaaggtgctcattgaagccatggtagaccgggcagaggcggagtgtgaagtcctcttccctgggtacacacacttgcagagagctcagcccatccgctggagccactggatcctgagtcacgccgttgcgctgacacgagatttagagagactgaaggaggtgcagaagcggatcaatgtcctgccactgggcagtggggccattgcaggcaaccctctaggtgtggaccgggagttcctctgtgcagaactgaactttggagccattacgctcaacagtatggatgccaccagcgagagagacttcgtggctgagttcctgttttgggcttctctgtgcatgacccatctcagcaggatggcagaagacctgattctctacggtaccaaggaattcaactttgtgcagctctccgatgcctacagcaccggaagcagcttgatgccccagaagaaaaacccagacagcttggagctgatccggagcaaggcgggccgagtgtttgaagtgtctgataccatgacagctgtcctccaagtagccactggagtcatctctacactgcagattcatcgtgagaacatggcacaggcactcagccctgacatgctggctaccgaccttgcctactacctggtccgcaaagggatgccattccgccagcccacgaggcctcagggaaagctgtggtcgtggcagagatgaaaggggtggctctcaaccagctgtcacttcaggagatgcagaccgtcagtcccctgttctcgagtgacgtgaatctcgtgtgggactacagccacagcgtggagcagtacacagccttgggtggcacagcacagtccagtgttgagtggcagatcagccaggtgcgggccctgctgcagatgtagcagccctagattccacccagtcaaagctgcgccccaataaagtggagccctggagaggccgccat

SEQ ID NO: 458 - DNA, 3038 bp, Rattus norvegicus
gaactcacgagcctcgcacgcagaggccctcagcgccccgtctcccgctctgcggtatccccagatccccggacgggtgttgtgggaggctgaggacggcatgcgggactacgacgaggtgaccgccttcctgggcgagtgggggcccttccagcgcctcattttcttcctgctcagcgccagcatcatccccaatggcttcaatggtatgtctatcgtgttcctggcggggaccccggagcaccgttgccttgtgcctcacaccgtgaacttgagcagcgcgtggcgcaaccacagtatcccgttggagacgaaggacggacgacaggtgcctcagagctgccgccgctaccgactggccaccatcgccaacttctctgcgctggggctggagccgggacgggacgtggacctggagcagctggaacaagagaactgcctggatggctgggagtacaacaaggacgtcttcctgtccaccatcgtgacagagtgggacctggtgtgtaaggatgactggaaagccccactcaccacctccttgtttttcgtgggtgtgctgatgggctccttcatttcgggacagctctcagacaggtttggtcgcaagaatgtgctgtttttgaccatgggcatgcagactggcttcagcttcctgcagctcttctctgtgaacttcgagatgtttacagtgctttttgtccttgttggcatgggtcagatctccaactacgtggcagcatttgtcctgggaacagaaattctttccaagtcaattcgaattatattcgccaccttaggagtttgcatattttatgcatttggcttcatggtgctgcctctgtttgcatacttcatcagagactggaggatgctgctgcttgcgctcactgtaccaggggtgctgtgtggggctctctgggggttcatccctgagtccccccgatggctcatctctcaaggccgagttaaagaggcagaggtgatcatccgcaaagctgccaaattcaatgggattgttgcgccttccactatcttcgatcccagtgagttacaagacttaaattccaagaagcctcagtcgcaccacatttatgatctggtccgaacacgaaatatcaggatcatcaccatcatgtccataatcctgtggctgaccatatcagtgggctacttcggactttctcttgacactcctaacttgcatggggacatctatgtgaactgcttcctactggcagctgttgaagtccccgcctatgtgttggcctggctgttgctacagcacctgccccggcggtattctatctctgctgccctcttcctgggtggcagtgtccttctcttcatacagctggtgccttcagaattgttttacttgtccactgccctggtgatggtgggcaagtttggaatcacttctgcctattccatggtctatgtgtacacggccgagctgtaccccactgtggtcagaaacatgggtgtgggggtcagctccacagcatcccgccttggcagcatcctgtctccctactttgtctaccttggtgcctatgatcgcttcctgccttatatcctcatgggaagtctgaccatcctgacagctatcctcaccttgttcttcccagagagctttggtgcccctctccccgacaccattgaccagatgctcagggtcaaaggaataaaacaatggcaaatccaaagccaaacaaggacgcaaaaagatggtggagaaagcccaacggtcctaaagagcacagccttctaacaccctgtccagaaggtgaaaaactgaaaggaaacctgcgtgtagtcagaaatgctctcaatcactgagggctttctgttctgttgaccttgtgtctcacatgctcacggatggggcatctgtcctgaagagccaccttcctccagggccaccaaggctaaccacacacagcttgcacatcccatcacagtgtggactggggcctcccagagaagttactgagtctcttgaagcagtgggacttggaagactgagaaacatctgctagacacgctttgttatcctgtaagacctgatagtcacagacagaacagcaggtctgtttcccctcctttccctaactgaagaacttacaggaaaggaataaaagtgactcagtggtggtgtgcttgtctaggatgcaccagaaggaaacaaaaatttcttttcagaaaataagtgattccatggggagtttgatttctcatcttacctaagttaaccaaaatcctgtgatcattttaacccacaacagaagaacacaagaccaagggaaccctaaaggaaactgaggtgaggctggtacataaagcagacagtgtgtggactgtggctgctctgcccctcagccagctgtactgtgtgtgtctggtcagggtcctgccttgcccagaccctgtgagaaacctactgttgaggccaggcttggcctccactgctgtgtaaatcagaactcaggctgccagacacttggctgtgtcttgagggaaatgtatggataacagagtgtcccttccttcttccagcactgtcatgggagtttgtcatctgctgttgtatctcaagctatttgtcctttagcagaaacttgggaactgcctgtgtttcccagctcagggttaccctggctggtgtgcagttgccaatataaatggccttcacagtcttagccactagagcggctctgagtgccaaaaatactaacaccatgcttcttccttttacgatgtgtaatcatgaggaaaatcacaagaaagaaatgtaaattgtgttcacagtctctcagagtcgctggctgcagtcacatcggtggggatttcgtgttcagtgattgtcttctcttctgattatgttgccatggtgctccgaaagcacacgcttcacgctcttaaaatgcaaaacaaacacagaaacccgtattttgtgaaagctactgaagtgccttgggcaaggatatggttttaataaactgattttttttttaaataataaaaaaaaaaaaaaa

SEQ ID NO: 459 - DNA, 1942 bp, Rattus norvegicus
ggagcagctcgctcgcctgcagctcgcgagcgctgagcgagccgcccgaagggtagatttaccaggctgtttctgagtgtggattgttacccttggtaagaaaatgtcgtccatcttgccattcactccgccagtggtgaagagacttctgggatggaaaaaatcagccggtgggtctggaggagcaggtggtggagaacagaatggacaggaagaaaagtggtgtgaaaaagcagtgaaaagtctggtgaaaaagctaaagaaaacaggacgattagatgagcttgagaaagccatcaccactcagaattgcaatactaagtgtgtcaccataccaagcacttgctctgaaatttggggactgagtacagcaaatacggtagatcagtgggacacaacaggcctttacagcttctctgaacaaaccaggtctcttgatggtcgtcttcaggtgtctcatcggaaagggctgccacatgttatatattgccggctgtggcgctggccagaccttcacagccatcatgagctcaaggcgatcgagaactgcgaatacgctttcagtctgaaaaaagatgaagtgtgtgtgaacccttaccactaccagagggtggagacaccagtcttgcctccagtcttggtgcctcggcacacagagattctaacagaactgccgcctctggatgactatacccactccattccagaaaacacaaatttcccagcaggaattgagccacagagtaattacatcccagaaacaccaccacctggatatatcagtgaagatggagaaactagtgaccaacagttgaaccaaagtatggacacaggctctccggctgaactgtctcctaccactctctcccctgtcaatcacagcttggatttgcagccagttacttattcagaacctgcattttggtgttcaatcgcatattatgaactaaaccagagggttggagagaccttccatgcgtcacagccctcactcactgtagacggctttacagatccatcgaactcggagaggttctgcttaggtttgctctccaacgttaacagaaacgctactgtagaaatgaccagaaggcatataggaaggggagtgcgcttgtattacataggtggggaagtgtttgccgagtgcctaagtgatagtgcgatctttgtgcagagccccaactgtaaccagagatacggctggcaccccgcgacagtgtgcaaaatcccaccaggctgtaacctgaagatcttcaacaaccaagaatttgctgctcttctggctcagtctgttaaccagggttttgaggccgtttatcagctgactcgaatgtgcaccataagaatgagcttcgtgaaggggtggggagcagaataccggaggcagacagtaacaagtactccttgctggattgaacttcatctgaatggccccctgcagtggttggacaaagtattaactcagatgggatccccgtcagtgcgatgctcaagcatgtcctaaagtccgtcagcagtggagctcattggaagacttaacgtaccaactcctccgccacagtactcgtgtgtgatcccgtggactgtgctagtcaaaacccagagcgaaaacagcacttgaggtctcatcagttaaagcaccttgtggagtctgtttcctacatttgaattttagatgggaaattagtgtctagaaatgccctccccagaggggacaaagaagacttaaagacttaatgatgtttcgttgggcataagacagtgtcccaaaggttattaataccagtagtagttgtgtacagtaacgtgtccagacccagtattgcagtgctctgctgtttgtataccttcttagtgtgcataaatgaggtgtgtgctgctgcttggtctaggcaagcctttataaaattacagtacctaatctgttattcccaaaaaa

SEQ ID NO: 460 - DNA, 5350 bp, Rattus norvegicus
  misc_feature (1)..(5350): n = a or c or g or t
gggtaggagaaagggaagggtgggtaaggacggaaaaagcagcatcggtcagccgcgaaccccaggagaaaasstgggggcctgagccagaaccggagccctagcggcacaagscagacacccagggttggtcanctccgcatgatgagtctccggcttttcagcattctgctcgccgctgtggtctctggagcccagggctggggctactatggctgcaatgaggagctggtggggcctctgtatgcacggtctctgggtgcttcctcctactatggactctttaccacagcccgctttgcccggctacacggcatcagtggatggtcgccccggattggggacccgaatccctggctccagatagacttaatgaagaagcatcgaatccgggctgtggccacacagggagcctttaattcttgggattgggtcacacgttacatgctgctctacggggaccgtgtggacagctggacaccattctaccaacaagggcacaacgcgaccttcttcggtaatgtcaacgactcggcggtggtacgccatgacctgcactaccattttacggctcgctacatccgcatcgtgccactggcctggaacccccgcggcaagattggcttgaggctgggcatctacggttgtccctacacgtccaacatcctgtattttgacggcgatgatgccatttcataccgcttccagcgaggggccagtcaaagtctttgggacgtgttcgcttttagtttcaagacagaggagaaggacgggctgctgttgcacaccgaaggctcccagggggattatgtgacgcttgaactgcaaggagcacacctgctgctgcacatgagcctgggcagcagccccatccagccgagacctggtcacaccacggtgagcgctggtggcgtacttaatgacctaagctggcattatgtgcgggtggaccgatacggccgagaagcaaatctcaccctggatggttacgtacatcgctttgtgctcaacggcgactttgaaaggctgaatctcgaaaatgagatattcatcggaggtctagtgggcgcagcgcgtaagaacctggcctaccgccataacttccgtggctgtatagaaaacgtgatctacaaccggatcaacatagctgaaatggcagtgcagcgccattcgcggatcaccttcgagggtaatgtggctttccggtgcttggatcccgttccacaccccatcaacttcggaggccctcacaacttcgtccaagtgcctggctttccacgtcgaggccgccttgctgtctccttccgcttccgcacctgggacctcacagggctgctccttttctcccgcttgggggatgggctgggtcatgtggagctgatgcttagtgaagggcaagtcaatgtatccatcgcgcagactggccgcaagaagcttcagtttgctgcggggtaccgcctgaatgatggcttctggcatgaggtgaactttgtggcacaggaaaaccatgcggtcatcagtattgatgatgtggagggggcagaggtcagggtatcatacccactgctgatccgcacagggacttcatacttctttggtggttgtcccaaaccagccagtcgatggggctgccactccaaccagacagcattccatggctgcatggagctgctcaaggtggatggtcaactggtcaacctcactctggtagagtttcggaagcttggttactttgctgaggtcctctttgacacatgtggcatcacagacagatgcagccctaatatgtgtgagcatgatgggcgctgctaccagtcttgggatgacttcatctgctactgcgaactcaccggctacaagggagttacctgccatgaaccattgtataaggagtcctgtgaagcctatcgcctcagcgggaaatattctggaaattacaccattgatcctgatggcagtggacccctgaaaccatttgtagtgtattgtgatatccgagagaaccgagcatggacagttgtgcgacatgacaggctatggaccactcgagtgacaggttccagcatggaccggccctttctgggggccatccaatactggaatgcctcctgggaggaagtcagtgctctggccaatgcttcccagcactgtgagcagtggatcgagttctcctgctacaattcccggctgctcaacactgcaggaggctacccctacagcttttggattggccgaaatgaagaacagcatttctactggggaggctcccagcctgggatccaacgctgtgcctgtgggctggaccagagctgtatagaccctgcactgcactgcaactgcgatgctgaccagccacagtggagaacagacaaggggctcctgacctttgtggaccatctgcctgtcactcaggtagtgataggtgacacaaaccgctccagctctgaagctcagttcttcctgaggcctctgcgctgttatggtgaccgcaattcctggaacactatctccttccgcactggagctgcactgcgtttccctccaatccgtgccaaccacagccttgatgtctccttctacttcaggacctcggctccctcaggagtcttcctagagaacatggggggtcctttctgccagtggcgccgaccttacgtgagagtggagctcaacacatcccgggatgtggtctttgcctttgatattggcaatggggatgagaacctgacagtgcactcagatgacttcgagttcaatgatgacgagtggcatttggtccgggctgaaatcaacgtgaagcaggcccggctgcgagtggaccatcggccctgggtgctaaggcccatgcccctgcagacgtacatctggctggagtatgaccaacccctctatgtgggatctgcagagcttaagaggcgcccatttgtggggtgcttgagggccatgcgtttgaatggagtgactctgaacttggagggtcgtgccaatgcctccgagggcaccttccccaactgcacgggccactgcacccacccccggttcccctgtttccacggaggacgctgtgtggagcgatacagctactacacgtgtgactgtgacctcacagcttttgatggaccatattgtaatcacgatattggtggattctttgagactggcacatggatgcgctataacctccagtcagcactgcgttctgcggcccaggagttctctcacatgctgagccggccggtaccgggctatgagcctggctatatcccaggctacgacactcctggttacgtgcctgggtaccatggtcctgggtaccgcctacccgactacccaaggcctggccggccagtgcccggataccggggncccgtgtacaatgttactggagaggaggtctcctttagcttcagcaccagctctgctcctgcagtcctgctctacgtcagctcctttgtgcgtgactacatggccgtgctcatcaaggaagatgggaccctacagcttcgctatcagctgggcaccagtccctatgtgtaccagctaaccacccggccagtgaccgatggccaaccccatagtgtcaacatcacccgggtctaccgaaacctctttatccaggtggactacttcccgctgacagaacagaagttctctctcctggtggacagccagctggactcccccaaggccttgtatctagggcgtgtgatggagacaggagtcattgacccagagattcagcggtacaacaccccaggtttctcaggctgcctgtctggtgtccggttcaacaatgtggctcctctcaagacccatttccgaacccctcgccccatgactgctgagctggcggaggccatgcgggttcaaggagaactgtcggagtctaactgtggcgctatgccacgccttgtctccgaggtgccaccagagcttgatccctggtacctgcccccagatttcccatactaccatgacgacggatggattgccatactcttaggttttttggtggccttcctgctgctggggcttgtgggaatgctggtgctgttctatctgcaaaatcatcgatacaagggctcctatcacaccaacgagcccaaggccacccatgattcccaccctggcggcaaagctcccctacctccctcaggccctgcccaggcccctgcccccactccagctcccacccaggttccgaccccagccccagccccagcctctggcccaggccccagggaccagaacctcccccagatcttggaggagtccaggtctgaatgagtcacaagggcttcagggaccaaggccaactcctctaagtyccttmagctcctgcctctcctctcccctgtcagggacatttggctcttcttagcaggctctgttcaccaggaggatcccctcttgccaagtttggtgtgcagagctacagatgggaccaaagggagtggccgagtctcactgcctaaaccaatgccctgcccccaccccccaccccagctcctggctgtttgcctgccctacgggagaaagctcatggagctgaggcgggcctttcctgccatctctgtcccagctgctggcaaggattaacaaccaagggcaggggagatgaactgcctcccttcctgtgggtattatcagcagggacagatgtgggggatcgaggggctgcacagggcaggcagggagggagggaggaggctgctaaaacacaccctggagcctcccccctgccctrctgaccggctgtcttccatctrcttcctctcagctggggttgagggaagaacttcatccccaccccccacctcacccaaccctttttgttcttacagagaccaagaggcctcagcttagtcactttagtacctccactgcttcacatgctttagccaaagccataaaaagcctgcaagtagaagaaataatgcagaccctgcccagccagtcctctgctcctccacccctttccaaaatacgcaatagcctgggtgcctgtgtgcaggcctggcccccctccgtgcatgaggagccccccctcccccgctcagagatgctgcgtgttcgtccaggaggtcatattctttatatatattttttgttgcaaagcctctctctagagaactatatattactctaattttttaattatctgtttatatataaaagaactcagtgggccgtcctgtgctgtgcccagtttgtagtgagctccttctgtgttggatgtctcatgagtcctgccagccactcacccgcctgccgggcctccattctagagcagggcagagcccgctgtgccctcacctgagcaggttcaataaaagcagmgtggcagaaa

SEQ ID NO: 461 - DNA, 1356 bp, Rattus norvegicus
ggagactgtcttttccaacccgacatggatgtgctcccaatgtgtagcatcttccaggaactacagattgtgcacgaaacgggctacttctcggctctgccgtccctggaggaatattggcaacagacctgcctggagttggaacgctatcttcagagtgagccctgctacgtgtcagcctctgagataaaatttgacaaccaggaagacctgtggaccaaaatcattctagcacgggagaggaaggaggaatcagaactgaagatttcttctagtcccccagaggactctctgatcagctccggctttaattataacttagagaccaatagcctgaactctgatgtcagcagcgaatcttcagacagttcggaggaactttcgcccacgaccaagtttacctctgaccccattggtgaagtcttagtcaattcaggaaatctgagttcctcggtcatttccacacctccttcttctcccgaagtaaatagggaatcttctcaactatggggctgtgggccaggagacctgccctcacctgggaaggttcgaagtgggacctcggggaagtctggcgacaagggtagtggcgacgcctccccagatggcagaagaagggtacatcggtgccattttaacggctgcaggaaagtttacactaaaagctcccacttgaaagcacatcagcgcactcacacaggagaaaagccttacagatgctcttgggaaggttgtgagtggcgttttgcaagaagtgatgagttgaccagacacttccgaaagcatactggtgccaagccctttaaatgctctcactgtgacaggtgtttctccaggtctgaccacctggccctgcacatgaagaggcatctctgagggagcagaggatgaatcctgtaggctaaaagaggcttccaggctaagaggcggccatggaaggagggatacctgtaccagccaaagcatgccattgcttcctacccagttacctccagaggcctctctttggaaggtcttttgagggctacaaaagtcatgtcagaagcggcatagcacccacggtgcatggtgtttgggtgaccccggactcaccactggtttctaaccttctgagaggctctaagcttttcgccgtgagcatgcgcactgagaatgttaatgggtgggaatgactgactgtatgttgaggatctattactgactgtatggcgaggcagactttttttttccccccttgtggtagcaaatacctgcaagagacagaaaaaaaaagcagtttgaatgttttgtgtgtgaggagtattccaagggatgagttgaccaccaatcatttcctgaagggtgtctgcaccttag

SEQ ID NO: 462 - DNA, 922 bp, Rattus norvegicus
atggagcgggtgaagatgatcaacgtgcagcccatgctggaggccgcggagtttttggagcgcagggagcgagagtgtgaacatggctacgcttcatcattcccctccatgccgagcccccggctacagcactcaaagcccccacggaggttgagccgggcacagaaacacagcagtgggagcagcaacaccagcactgccaacagatctacacacaatgagttggaaaagaatcgacgagctcacctgcgcctgtgtttagaacgcttaaaagttctgattccgctgggcccagactgcaccaggcacacaacacttggtttgctcaacaaagccaaagcacacatcaagaaacttgaagaagccgaaaggaagagccagcaccagcttgagaacttggaacgagaacagagatttttaaagcggcgactggaacagctgcagggtcctcaggagatggagcgaatacgaatggacagcattggatcaacgatctcctcagatcgctcggattcagagcgagaggagattgaagtggatgtggaaagcacagagttctcccatggagaagtggacaacatcagtaccaccagcatcagcgacatcgatgaccacagcagcctgcagagtattgggagtgacgagggctactccagtgccagtgtcaaactctccttcacgtcctagaacccagcatgacataacagtgcagggcgaagtgctcactggccagttcaataccgtctctcaaattgggttcatgacgcagtctcctctttaaaactaaaaactatacttgaacaaaaggtcagaagacctgtatttaagcaaatacttaaaaagtggggtagagcctccccggtagaacaaatactcctgtatttggaaagatacagtttctaacagcagcaaaaaaaaaaaa

SEQ ID NO: 463 - DNA, 3449 bp, Rattus norvegicus
gctttgatctgttcagataaaggatgtccactgaaaatgtggaagggaagcccaataatcttggggagagaggaagagcccgaagctccactttcctcagggttttccagccaatgtttaaccacagtattttcacttctgcagtctccccggccgcagaacgtatccgattcatcttgggagaggaagatgacagcccagcacctcctcagctcttcacggaactcgatgagctgctggctgtggatggacaggagatggaatggaaggagacagccaggtggattaagtttgaagagaaagtggaacagggtggggagcgatggagcaaaccccatgtggccaccttgtccctgcacagcttgtttgagctgaggacatgtatggagaaaggatccatcatgcttgaccgggaggcctcctctctcccacagctggtggagatgattgcagaccaccagatcgagacaggcctcttgaagcccgacctcaaggataaggtcacctatacgctgctgcggaaacaccgacatcaaaccaagaaatccaaccttcggtccctggctgacattgggaagacagtctccagtgcaagtaggatgttcagcaaccctgataacggtagcccagccatgacccacaggaatctgacatcctccagtctcaatgacatttctgataaaccagagaaggaccagctgaagaataaattcatgaaaaaactgccccgtgatgcagaagcttccaacgtgctcgttggggaggttgacttcttggacactcccttcattgcctttgttcgtctacagcaggctgtcatgctgggtgccctgactgaggtgcctgtgcccacaaggttcttgttcattctcttaggtccaaaggggaaagccaagtcctaccatgagatcggaagagccatcgccaccttgatgtctgacgaggtgttccacgatatcgcttacaaagcgaaagatagacacgacctgattgctggcattgacgagttcttagatgaagtcattgtcctgccacctggggaatgggacccggcaatcagaatagaacctccaaagagcctcccatcatctgacaaaaggaagaatatgtactcaggtggagagaacgttcagatgaatggggacacacctcatgatggaggccacggaggaggaggccacggtgactgtgaagaactacagagaactggccggttctgtggtggattaattaaggacataaagaggaaagcaccattttttgccagtgacttttatgacgctttaaatattcaggctctctcggcaattctcttcatctatctggcgacggtaaccaacgccatcactttcggaggcctgctcggggatgccactgacaacatgcagggtgtgttggagagtttcctgggcactgctgtctctggcgccatcttttgcctttttgcgggtcaaccgctcaccatcttgagtagcacgggacctgttctggtgtttgagaggcttctttttaacttcagcaaggaccatagttttgactacttggagtttcgtctttggattggcctgtggtcagccttcatgtgtctcatcctggtggccactgatgccagcttcctggttcagtacttcacccgtttcacggaagaaggattctcctctctgatcagcttcatcttcatctatgatgctttcaagaagatgatcaagctggcagattactatcccatcaactctgacttcagagtgggctacaacactcacttctcctgtgcttgcctgccacctgacccagttaatctctcagtatctaatgataccacactagccccagaggacctgccaaccgtttcttctactgacatgtaccacaatgctacctttgactgggcctacttgtcaaagaaagagtgtgtgaaatttggaggaaagctcgtgggaaacaactgtgacttcgtgcctgacatcacactcatgtccttcatcctcttcctgggcacttacacctcttctatggccatgaagaaattcaaaaccagccgctattttccaaccacagcaagaaaactgatcagcgattttgccatcatcctgtccattctcatattctgtgtaatagacgccctcgtcggtgtggatactccgaagctaattgtgccaagtgagttcaagccaacaagccctcaccggggttggtttgtcccaccctttggaggaaacccctggtgggtgtgccttgctgctgctatcccggctttgctagtcaccatcctgattttcatggaccagcaaatcacggccgtgattgtgaacaggaaagaacataagctcaagaagggagctggctatcacctggacctgttttgggtcgccatcctcatggtggtgtgctccttcatggctcttccctggtatgtggctgctactgtcatctccatcgctcacatcgacagtctgaagatggagacagagacttctgcgcctggagaacaaccaaagtttctgggagtgagagaacaacgagtcactggaacccttgtgtttattctgactggcctgtcagtctttatggctcccatcttgaagtttatccccatgcctgttctgtatggcgtgttcttgtatatgggggtggcctcactgaacggtgtgcagttcatggaccgtcttaagctgcttctcatgcccctgaagcatcaacctgacttcatctacctgcgccacgtccccctgcgccgagtccacctgttcacctccctgcaggtgttgtgcctggctctgctctggatcctcaagtccacagtggctgcgattatttttccagtcatgatcctggccctggtagctgtcagaaaaggtatggactacctcttctcccagcacgacctcagcttccttgatgatgtcattccagagaaggacaagaaaaagaaggaggatgagaagaagaagaaaaagaagaaaggaagtctggatagcgacaacgacgattctgactgcccatactcagaaaaggtccccagtattaaaattccaatggacatcacggaacagcaacctttcctaagtgataacaaacccttggacagagaaagatcctcaacattccttgaacgccacacatcatgctgataaaattcctttccttgagtcactgggtttacccagtcctccaagatctccagtgaaagtcgtgcctcaaattagaatagaacttgagtctgaagacaacgattatctttggaggaacaagggaacagaaaccacgttgtaacctgttagtcattctcaaaactgacagttctattgttaactgttctaatttttttttgtctatgtattttaaaaacttttgtttggtcactgactgaataatacagtcactctctctgcttctctcttgcataggtaaaaatcaagacaatagtgtcccttttctttaaaaaaaaa

SEQ ID NO: 464 - DNA, 1018 bp, Rattus norvegicus
gtgtggagcaaagatacatctttagccatggatgtgttcatgaaaggactttcaaaggccaaggagggagttgtggctgctgctgagaaaaccaagcagggtgtggcagaggcagctgggaagacaaaagagggcgtcctctatgtaggttccaaaactaaggagggagtcgttcatggagtgacaacagtggctgagaagaccaaagagcaagtgacaaatgttggaggggcagtggtgactggtgtgacagcagtcgctcagaagacagtggagggagctgggaacattgctgctgccactggttttgtcaagaaggaccagatgggcaagggtgaagaagggtacccacaagagggaatcctggaagacatgcctgtggaccctagcagtgaggcttatgaaatgccttcagaggaaggctaccaagactatgagcctgaagcctaagaatgtcgttgcacctactgtcctaagatctgcccaggtgttcttccatggcgtacaagtgctcagttccaacgtgcccagtcatgaccttttctcaaagctgtacagtgtatttcaaagtcttccatcagcagtgatcggagtcctgtacctgcccctcagcatcccggtgctcccctctcactacagtgaatacatggtagcaggctcttgtgtgctgtggatattgttgtggcttcaaacctaaaatgttagaagaaacttaaaacacctaagtgactaccacttatttccaactcttcaccgtttttggttgctgttctcaagaagttgtgatttgctataagacttttagatgtccttaatgattctttctgtctaagaagaatgatgtgctgtgaaatttgttaatatatattttaaaatatgtgagcatgagactacgcacctataaatattaatttatgaattttacagttttgtgacgtgttttattaacttgtgtttgtatataaatggtggaaattaaaataaaataaaaacattatctcattgcaaaaaaaaaaaa

SEQ ID NO: 465 - DNA, 2436 bp, Rattus norvegicus
agctttccggggcagcgagtggcggggccgggtgctgagcgagcggggcgtggagagcgtcgcgcggcccctcgcgccgggctccgtttgcaggccacagcccccgcgaggtggcccgccggccctgggccgcccgtcctctggcagctgtggtgagcgcagcgtcgggccggcatgaaggtcacgtcgctcgacgggcgccggctgcgcaagatgctccgcaaggaggcggaggcgcgctgcgtggtgctcgattgccggccctacctggccttcgccgcgtcgagcgtgcgcggctcgctcaacgtcaacctcaactccgtggtgctgcggcgggcccggggcggcgcggtgtctgcgcgctacgtgctggccgacgaggcagcccgcgctcggctgctgcaggagggcggcggcggcgtggcggcggtggtcgtgctggaccagggcagccgccactggcagaagctgcgggaggagagtgccgcgcgcgtcgtcctcacctcgctgctggcctgtctgtccgccggaccgcgggtctacttccttaaaggtgggtacgagaccttctactcacagtatcctgagtgctgtgtggatgcgaagcccatttcacaagagaagctcgaaggtgaaagaggcctcctcagccagtgcggaaagcccattctcagcgtcgcctacagaccagcttatgaccagggtggcccagttgaaatccttcccttcctctaccttggaagtgcctaccatgcatccaagtgcgagttcctcgccaacctgcacatcacagccctgctgaatgtttcccgccggacctctgaggcctgcacaacccacctacactacaagtggatccctgtggaggacagccacaccgccgacattagctcccactttcaagaagcaatagattttattgactgtgtcagggaagagggaggcaaggtcctggttcactgtgaagccggggtctcccggtcgcccaccatctgcatggcttacctcatgaagaccaagcagttccgcctgaaggaggccttcgagtatatcaagcagaggaggagcgtggtctctcccaactttggcttcatgggacagctcctgcagtatgagtctgagatcctgccctccacacccaccccccaacctccctcctgccaaggggaggcagccagctccacctttataggccacttacagacactgagccctgatatgcagggtgcctactgcacattccctacctcagtgctggcaccggtgcccacccacgccaccgtcgcagagctccacaggagccccgtggccacagccacatcctgctgagaccggtcggctaccagcgcatccccaagagcaactgtgacctttggattttttaaacttgtggacatttcatacccgtgcaatactgaagacctctctctgtcccgctgccccggtgagatggtgaggggtcagcaggcttgcagatgcacttcaggctaacccggaggatggtttctcgcgattgtaggaaggccaagccatgcccccctagcacagcggcgtgctaactactgtacttccagaagccccgcccactcaggaccgcctcatccttgcacctcagaagtcccggcttctcatttcaagtgtaaggcaatacacagtcgcagcaaagtaggagcaagctgtgctggaccaggaggggaggagtccgcccgtctgggaggaagcacaagtttcactgttaatttgaatttcggccaactttgtctgtctctgtcctctgtcacttcagggaagagagctggtcaccgctcagtcagaaaagttaaccccgctggatttgtcaagacaaaaggacctgcccgtctgaacccagtgtttctgaggttctgtctaggatcccatggaagctgttggtgtaaggagaagctcctgactcattggagtttcttgctcaccgagggctccttggtgaccttggactttggcatggtttttacaaatacttgaacctgtcccattgtatctctccctaaagcacctctggtgtcattcagaaagttgtcagaccctagaccaaaaaccacccctttgagggggtagcaggaactgcctgcgttctgggtcagtggtggtgactgacatactttttcagtttagtgtcctgtgtgctttttttgtcatccattgtgacaatgtttccctccctaccctggggagtcgttttcaaactactgattctggggtctgcatcgtttgcaatgtggtactactatgtccttcgtagattgtttttccaaggggggaaaggcaataagtcacccccaaacccatgtgaatgtgaagaaaagcagtgttgatgttttttttatatatatatatatacatgtagtacaaaattaaaaaaatgtcaaaaaataaaaataaaaagtgctaagtgaa

SEQ ID NO: 466 - DNA, 1953 bp, Rattus norvegicus
cagcagggagaatttctagtgacggagcggatccttctccacagaaatggcctccaccttcaaccccagagagtgtaaattgtccaaaaaagaggggcagaactatggcttcttcctccgcattgagaaggacactgacggtcacctggtccgggtgattgaggaggggagcccggcagagaaggcagggctcctagacggcgacagagtgctcaggatcaaacgggtctttgttgacaaggaagagcatgcacaggtggtggatctggtcagaaagagcgggaattcagtgaccctgctggttctggatggagactcctatgagaaggctgtaaaacatcaggtggacttgaaagaactggatcaaagcccgagggagccagctctgaatgaaaagaaacccgaccttgggatgaatggaggggtggagacgtgtgcccagccacggctctgctacctggtgaaggagggcaacagctttggcttctctctgaaaactatccaaggtaaaaagggcgtgttcctgactgatataacacctcagggcgtggccatgaaagctggtgttctggctgatgatcacttgattgaagtgaatggagaaaatgtagaaaacgccagtcatgaggaagtggtggaaaaggtgacaaagtcaggaagccgtatcatgttcctccttgtggacaaagaaactgccaggtgccatagtgagcagaaaacaccgttcaagcagggagacagccagtttgaaactgctgccccaccagccccgggtagtagtgatcaagaagggcagcaatggctacggtttctatctgaggcgggccctgaacagaaaggtcaaatcatcaaggacatagaacctggaagyccagcagaggcagctggcttgaagaacaatgacttggtagttgctgtcaatggcgagtctgtggaagctcttgatcatgacggtgtggtggaaatgattagaaacggtggagaccagactactctgttggtgctggacaaggaggcagacagaatctatagcctggctcgtttctctccacttctctactgccaaagtcaagaactgcctaatggttctgtgaagaagccccagctcccatctctgctcctctggaggcccagctcagctaccacagaggacgtgggggatcataaacccaagctctgcaggctgattaaagaggacgacagctacggctttcacctgaacgccattcggggccagccaggctcctttgtcaaggaggacagcagggtggccctcgctgacaaggcatggctgaagaatgaggacatcatcattgaagtgaatggggagaatgtgcaagatgaaccctatgacagagtggtggagagaatcaagagcagcggggagcacgtcactctgttggtctgtggaaaggtggcctacagctattttcaagctaagaaaatccccatcctttccttccttggctgaccccctggtggctggtcctgatgcaaaaggagagactgagcatgactcagcagagtccacgaaagactctctcaccacccagcaagagaccgaactctcagtcgcagcctcccactcttcttccaactctgaagacacggtgatcgtgaagagaacaaacgacgtttcccctcatggtccgaggaaggagcccctcggaccctagcacagacctcctcagaaccatcagtccctgaccgaaactgcggactgtctgtctgtctgtctgctgctgtaagggctgctactgcaggctgcttatttatgctcagcttagctggagggagggccaggttccggttctttctatgtggtatcttccaacgtgcaacttttcacttctgttgatgaaactttgatgaaacgtcttacttctgtgggcttgagcactgggatgattcatttgtgtcttgtgagtgatgatgattaaagtacccagcaga

SEQ ID NO: 467 - DNA, 856 bp, Rattus norvegicus
ccagcgtcaccactgccgccatgcccggagggctgcttctcggggacgaagcccccaactttgaggccaataccaccatcggccacatccgcttccacgatttcctaggagattcatggggcattctcttttcccacccacgggactttaccccagtgtgcaccacagaacttggcagagctgcaaagctggcgccagagtttgccaagaggaatgttaagttgattgctctttcaatagactctgttgaggaccattttgcctggagcaaggacatcaatgcttacaatggtgcagcacccacagaaaagctaccatttcccatcatcgacgataaggacagggaccttgccatcctgttgggcatgttggatccagcagagaaggatgaaaaaggcatgcccgtgacagcccgtgtggtattcatttttggccctgacaagaaactaaaactgtccatcctctacccagccaccacgggcagaaactttgatgagattctcagagtggttgactccctccagctgacagcatcaaatccagttgccactccagttgactggaagaagggagagagtgtgatggtccttcccaccctccctgaagaggaagccaaacaacttttccctaaaggagtcttcaccaaagagctcccatctggcaagaaatacctccgttatacgccccagccttaagtctgcgggaactggggctgcaactgctcgcccagcactgggacctgaggatgacagctgacagctgcagttccgtagaaagattgtggcgtggtcacagccgaagtcgcgtaggtcgctcgctatactactggctcattaaatggaaatggcaccaaaac

SEQ ID NO: 468 - DNA, 602 bp, Rattus norvegicus
gagggcagacatttggaaaacaggcaagactttggagaaagcagaccaggtatgatggccaccttgccaccaacagcccacacttcccagcaacctgtaaacatagaggacgaagatgggatcctggatgagtatgaccagtacagcctggcccaatcttatgtcgtcggtggaggtcggaaaggacgtaccaagagagaagctgctgccaacaccaaccgccccagccctggtgggcatgagaggaagctgctgaccaagttccagaactctgaaaggaaaaaggcctggcgctgagacagagctggagatgaggccagaccacggacaccacacccagcaatggatacaggaccttggagaaattaggagttgtaagcaggacctaggcctgcttgattctttcccacctaagtgaggctctggagagggaacaccaaaaaaagcccttccggacccagctaaagggcaagttaggagcgagaagcagagggtagatgggcagagctaagaaggcacccccaaaaagaacagtgggaaaaactggatgcccttgggtggcagtaacaataaactgtacaacagtgacagcaaaaaaaaaa

SEQ ID NO: 469 - DNA, 1678 bp, Rattus norvegicus
ttacccaacctgcaccctctcactggctacagcactccctccgaccttgggattcccagacaccggccagcgttgctgcccttcggcttcctagccctgcgtaggcgcaggtgcaacctccctgcagtgggcctggtgcaataggactgcggacatcatggcgcacggaaacgcccctcgggacagctaccacctggtcgggatcagcttcttcattttgggtctgggcaccctcctcccctggaacttcttcattaccgccatcccgtacttccaggggcggttggcagggaccaacagcagcgctgagaccccgagcaccaaccacaccagtcccacagacaccttcaacttcaacaactgggtgacactgctgtcccagctgcctctactgctcttcacgctcctcaactccttcttgtatcagtgcatccctgagtcggtgcgtattctgggcagcctgctggccatactactgctctttgccctgacagcagcgctggtgaaggtggatttgagccccgggctgttcttttccatcaccatggcatccgtctggttcatcaattccttctgtgcagtgcttcaaggcagcctctttgggcagctgggtaccatgccttctacctacagcaccctcttcctcagtggccagggcctggctgggatcttcgctgcccttgctatgctcacgtccttagccagtggcgtggacccccagacctctgcccttgggtacttcatcacaccctgtgtgggcatcctcctctccatcatatgttacctcagtctgccccatctgaagtttgcccgttactacctgaccaagaagcctcaggccccagttcaggagctggagaccaaagctgagctcctcggagctgatgagaagaatgggattcctgtcagcccccagcaggcaggcccaactctggatcttgacccagagaaggagctggagctggggctggaggaaccacagaagccaggaaaaccttcggtctttgtcgtcttccggaagatctggctgacggcgctgtgccttgtgttggtcttcacagtcaccctgtcggtctttcctgctatcacagccatggtgaccaccagctccaatagccccgggaagtggagtcagttcttcaaccctatctgttgcttcctgctcttcaacgtcatggattggctgggccggagcctgacttcctacttcctgtggccagatgaggacagccagctgctgcccctgctggtgtgcctgcgcttcctgttcgtgcccctcttcatgctgtgtcatgtgccccagcgtgcccggctgcccatcatcttctggcaggatgcctacttcatcacattcatgctgctcttcgccatttccaacggctacttcgtgtctctcaccatgtgtctggcacccaggcaggtgctgccgcatgagagggaggtggccggagccctcatgaccttcttcctggccctgggactctcctgcggagcctctctctccttcctctttaaggctttactctgaggaccaccgcactccacagtcctccctcactgctgcttctggagctggacattcccggggaaggacctctgctataccgggtctcttggtctgtgggtgccaggagggggcagaaactaccttggctggtagccacattgcatatggtga

SEQ ID NO: 470 - DNA, 2225 bp, Rattus norvegicus
ctgcagtacttgtacattgctaaataaagagagggactccaggaggagcagcctgggtctaagaggtaggcagaaggaggttttaggggcctgagcacaagcttgaggagagaaaggttattaaaaagccagacgcttacaggtctcagaagggctagccagaaactgtggctggggttaaggaaagggtttaagagtgtgggcttttggttctgaggatgtagaacgtgaatgttgagagaagaaccaagtggcggagttgggtgtgagcaatgctattaggaatttgaggcagggattcacgcgctgctgtgactattttttaacaatgactcagtgctgtgacctgatactgtttccagagcgacttctaaacaaattccccctttctaggccagacacatggccccaagcccaagaccccagcatgtcctgcactggaaggaagcccactctttctacctcctgtctccactgatgggcttcctcagccgggcctggagccgcctgagggggcccgaggtctcagaggcctggttggcagaaacagtagcaggagcaaaccagatagaggctgatgctctgttgacgcctcccccggtctctgaaaatcacctacctctccgagagactgaaggaaatggaactcctgaatggagtaaagcagcccagaggctctgccttgatgtggaagcccaaagttcccctcctaaaacttggggactttcagatattgatgaacataatgggaagccaggacaagatggccttagagagcaagaagtggagcacacagctggcctgcctacactacagccccttcacctgcaaggggcagataagaaagttggggaggtggtggctagagaagagggtgtgtccgagctggcttaccccacatcacactgggagggtggtccagctgaggatgaagaggatacagaaaccgtgaagaaggctcaccaggcctctgctgcttccatagctccaggatataaacccagcacttctgtgtattgcccaggggaggcagaacatcgagccacggaggaaaaaggaacagacaataaggctgaaccctcaggctcccactccagagtctgggagtaccacactagagagaggcctaagcaggagggagaaactaagccagagcaacacagggcagggcagagtcacccttgtcagaatgcagaggctgaggaaggaggacctgagacttctgtctgttctggcagtgccttcctgaaggcctgggtgtatcgcccaggagaggacacagaggaggaagaagacagtgatttggattcagctgaggaagacacagctcatacctgtaccaccccccatacaagtgccttcctgaaggcctgggtctatcgcccaggagaggacacagaagaggaagatgacggtgattgggattcagctgaggaagacgcgtctcagagctgtaccaccccccatacaagtgccttcctgaaggcctgggtctatcgcccaggagaggacacagaagaggaagacgacagtgagaatgtggccccagttgactcagaaacagttgactcttgccagagtacccagcattgtctaccagtagagaagaccaagggatgtggagaagcagagccccctcccttccagtggccttctatttacctggacagaagccagcaccaccttgggctgcccctaagctgccccttcgactgcagaagcggctcagatctttcaaagcccccgcccggaatcagggccctgagattcctctgaagggtagaaaggtgcacttctctgagaaagttacagtccatttccttgctgtctgggcaggaccagcccaggctgctcgtcgaggcccctgggagcagtttgcacgagatcgaagccgctttgctcgacgcattgccaggcagaggagcagctgggtccttaccttacccctgctttcagggccagagcatggacacgccttagaaacctaccccttcctctgtcgtcctcgtctcttccactgcctgagccttgctcttccactgaggccacacccctcagccaagatgtgaccactccctctccccttcccagtgaaatccctcctcccagcctggacttgggaggaaggcgggctaagcctgagtagttttttgtgtattctatgagtgttagtctcttaatacgaatatgtaacgccttttgcatttgtaaaaaaaaaaaaaaaa

SEQ ID NO: 471 - DNA, 11272 bp, Rattus norvegicus
atgtcctcgcagtttctctggggttttgttactttgttgatgatagctgaattagatggcaaaactggaaagccggagcagaggggacagaaaaggatcgctgacctgcaccagcctcggatgactacggaggagggaaacttagtatttcttacaagctctacccaaaacattgaatttagaactggatccctggggaaaatcaaattaaatgatgaagaccttggcgaatgtttacaccagatccagagaaacaaagatgatattatagatttaagaaagaatacaactggcctccctcaaaatatacttagtcaagtccaccaacttaactcgaagctcgtggatctggagagagattttcaaaacttacagcagaatgtggagagaaaagtttgcagtagcaatccctgccttaatggtggcacctgcgtcaacctgcacgactcctttgtgtgtatctgcccttctcagtggaagggtctcttctgctcagaggatgtcaacgagtgtgtagtttactcaggaacaccctttggctgccagagtggatccacctgtgtgaacacagtggggagtttcagatgtgactgcacgccggatacgtacggacctcagtgtgcatccaaatataatgactgtgaacagggctctaaacagctctgcaagcacggcatctgtgaggatttacagcgagttcaccatggacagccgaattttcactgcatctgtgatgctgggtggacaacaccgccaaatggaatctcctgcacagaggacaaagacgaatgcagcctccagccttcaccttgttcggagcatgcgcagtgtttcaatacacaaggctccttctactgtggggcctgccccaaaggttggcagggaaatggttatgaatgccaggatatcaatgaatgcgagatcaacaatggaggctgttcccaggcgccactggtcccatgcctgaacacacctggatcattctcctgtgggaactgtccagcaggtttcagtggtgacgggagagtgtgcactcccgtggacatctgttcgatccacaatggaggctgccatccagaggcaacctgctcctcatctcctgttctagggtccttcttgcctgtctgcacctgtcctccgggatatacaggaaatggttacgggtctaatggatgtgtacgcctcagtaatatttgctcaaggcacccgtgtgtaaatggacagtgcatagaaacagtatcaagttatttctgtaagtgtgactcaggctggtctggacagaactgtacagaaaacattaatgactgttcgagcaacccctgtttgaatgggggcacctgtattgatggcatcaatggcttcacctgcgactgcacaagctcttggactggctattactgtcagactccccaggcagcttgcggagggatcctctcagggacacaaggaacctttgcctaccacagcccaaatgatacctatattcacaatgtgaactgtttctggattgtcagaactgatgaggaaaaggttctgcatgtcaccttcacgttttttgatttagaatcagcaagcaattgtccccgggagtaccttcagattcatgatggagactcctcagcggatttcccacttggtagatactgtggctccaggcccccccaggggatccacagcagtgccaatgctctctatttccatctctactccgagtacataaggagtgggagaggctttacagcaaggtgggaggcgaagctgccagagtgtggcggcatcctgactgataattacggttctattacgtctccggggtaccctggaaactaccccccaggaagagattgtgtctggcaggttttagtcaatcctaactccttgataacatttacctttggaaccttgagcctggagagccacaatgactgcagcaaagactatttggagattcgagacggtcctttccaccaagaccctgttcttgggaaattctgcacttccttgtctaccccacccctcaagactaccggtcctgcagcaagaattcatttccattctgactctgagaccagtgacaaaggcttccacatcacctatctaaccacacagtcggatctggactgtggtgggaactacacagacacggatggcgagctcctccttcctcctttgtctggtcctttcagtcacagcagacagtgtgtctatctcatcacccaagcccagggagaacaaatagttatcaacttcacccatgtggagctggagagccagatgggctgttctcacacttacatcgaggttggagaccatgacagcttacttcgaaagatctgtggcaatgaaaccttgttccccattagatcagtttctaataaagtctggatcagattgagaatagacgctttagtccagaaggctagtttcagagctgactaccaagttgcttgtgggggtatgttaagaggagaaggattctttcgctcacctttctatcctaacgcatatcctggacgaagaacctgtaggtggaccatctcccaaccccaaagacaagttgtccttcttaacttcactgactttcagatcggaagttctgcctcctgtgatacagattatattgagattggtcccagctctgtcttgggatctcctggaaatgagaagttttgtagctcaaacataccgtcatttataacatctgtatacaatattctttatgttacatttgtgaaaagttcttccatggaaaatcgtggcttcacggctaagttcagcagtgacaaactagagtgtggagaagttctcacggcatctacaggaattatcgaaagtccaggtcatccaaacgtctacccaagaggtgtaaattgtacttggcatgtagtagtccaacgcggccaactgatccgtttggagttcagttccttttacctggagtttcattacaactgcacaaacgactacctggaaatttatgacactgccgctcagacttttcttgggagatactgtggaaaatccatcccgccttctcttaccagcaactctaattcaataaagctgatatttgtgtctgactccgcccttgcccacgaaggcttttccataaattatgaggcaatcgatgcatcatcagtatgtttatatgactatacagataattttgggatgctctcctccccgaacttccccaataattaccccagtaactgggagtgcatctacagaatcactgtgggactcaaccaacagattgcattgcatttcacagacttcaccttggaggactattttgggtcacagtgtgtagattttgtagaaatcagagacggaggctacgaaacgtcgccgcttgttgggatttactgtggctcagttttgcctcctacaatcatctcccacagtaacaagctctggctaaagtttaagagtgacgccgcactcacggcaaaggggttctcagcgtactgggacggatcatcaacaggctgtggaggtaatctcaccacccccacaggggtgctcacatcgcccaactacccgatgccctactaccacagctccgaatgctactggcggctggaagccagtcatggcagccctttcgagctggaattccaagacttccacctggaacaccaccccagctgctctctggattacttggccgtgtttgatggcccgactaccaactcccgactgatagataaactgtgtggggatacgacacctgctcccatccgttccaataaagacgtcgtattgttaaaactgaggactgatgcaggtcagcaaggccgtggctttgagatcaacttccggcagagatgtgacaatgtggtgatagtgaacaaaacctctggcatcctggagagcataaattatccaaatccctatgataagaaccaacgttgtaactggaccatccaagcaaccaccggcaacaccgtgaactacacgtttctgggatttgatgtggaaagttacatgaactgctccacagattatgtagagctctatgatggaccacaatggatgggacgctactgtggaaataacatgcccccaccaggggctacaacaggctcccaactccacgtactgttccatacagatgggatcaattctggggaaaaaggatttaagatgcagtggttcactcatggctgtggtggagagatgtctggaaccgcaggctccttcagcagccctgggtaccccaacagctatcctcacaacaaagagtgtatctggaacattcgcgtggccccagggagtagcattcagctcaccatccatgactttgatgtggaatatcatacaagctgcaactatgactccctggagatctatgcaggtcttgattttaactctccaagaatagcccaactgtgttcccaatcaccgtcagcgaaccccatgcaggtctccagcactggcaatgaactagcaatccgatttaagacggatagcactttaaatggaagaggtttcaatgcctcgtggcgagcagtccctggaggttgtggtggaattatccagctttccagaggagagattcattctccaaattaccccaacaactacagagctaacacagagtgctcctggatcattcaagttgagcgacatcaccgtgttctcttgaatatcactgactttgaccttgaagctccagattcttgcttacgacttatggatggctcaagttccacaaacgcccgtgtcgccagtgtgtgtggaagacagcagccccctaactctatcatcgcttcaggaaacagcctctttgtgagattccggtctggatcttccagccagaacaggggcttccgggctgaattcagggaagagtgcggaggccgcatcatgaccgactcttccgatactatcttctctccactgtaccctcacaactatctacacaaccagaactgttcctggataattgaagctcagcctccattcaatcacattactctctcctttactcactttcaacttcaaaacagcacagactgtacacgggactttgtagaaattttggatggcaacgactatgacgcacctgtccaaggccgttactgtggtttctccctgccccaccccatcatatcatttggcaatgccctaaccgtgaggtttgtcactgattccacacgcagttttgagggtttccgtgccatctattctgcatcgacatcatcttgtggtggaagcttctacacacttgatggcatcttcaatagccccgactacccagcagactaccatccaaatgcagaatgtgtctggaacattgccagctcccctggcaaccgcctgcaactgtccttcctatccttcaatttggagaattctctaaactgtaacaaggattttgtggaaatccgagaaggaaatgccacgggccacttgattggacgatactgtggaaactccctccctgggaattattcgtcagctgagggacatagtctatgggtccgatttgtctctgatggctcaggcactggcatgggcttccaggccaggttcaaaaatatatttggcaataataatattgtgggaactcatgggaaaatcgcatctcccttctggcctggaaaatacccctacaactccaattacaaatgggtggtaaatgtggacgcatatcatattatccacggtagaatcttagagatggacatagaacccacaacgaactgcttttatgacagtttaaagatttatgatggatttgacactcattcccgtctcattggcacttactgtggtacccagacagaatcctttagctccagtagaaactctctgacattccagttttcttccgactcttctgtgtcaggaaggggattccttctggagtggtttgcagtagatgtttctgatagcacccctcccaccatcgctccaggagcttgtggagggtttatggtgacgggagacactcctgtccatattttctccccgggttggcctagagagtatgctaatggtgctgactgtatctggatcatctatgctcctgactctactgtggaactcaacattctctccttggacatcgaaccgcagcagtcatgcaattatgacaagctgatcgtaaaagacggagacagtgacttatccccagagctggctgttctgtgtggcgtaagccctcctgggcccatccggtcaactggagaatacatgtacatccgcttcacttcagacaccagcgtcgcggggacaggcttcaacgcctcctttcacaagagctgtggtggatatttgcatgcagatcgaggagttatcacatcccccaagtatccagacacctaccttcccaacctcaactgctcctggcatgttctggtccagactggtctgaccatcgccgtccattttgagcagcctttccagattcaaaacagagactctttttgcagtcagggggattacttggtgctaagaaacggaccagataaccattctccaccactgggaccttctggaagaaatggtcgtttctgcggaatgtacgcaccgtccactctgttcacctcaggcaatgaaatgtttgttcagttcatctcggacagtagtaatggtggacaagggtttaagatcagatatgaggcaaagagtttagcctgcgggggcactgtctacatccatgatgctgactctgacggatacctgacctcccccaactaccctgctaattatccccaacatgccgaatgcatttggatcttagaggcgcctccagggagaagcatacagctccaatttgaagatcaattcaatattgaagacacacccaactgttctgtgagctatcttgaattgcgtgacggagccaactcgaatgcacgtctggtttccaagttgtgtggccacactctgcctcatagctgggtatcctcgagagaacgaatatacttgaagtttcacactgacggtggttccagctacatgggattcaaggccaagtactctatagcttcctgtggaggaacagtctcaggggacagtggagtcatcgagagcattggctacccgacccttccgtatgcaaacaatgtgttttgtcagtggtttatccgaggcctcccaggacactacctcactctcagttttgaagattttaaccttcagagctctcctggttgtacaaaagactttgtggagatctgggaaaaccatacctctggaagagttctggggagatattgtggaaactccactcctagcagtgttgacacttccagcaatgttgcttccgtcaagtttgtcacagatggctctgtcactgcctcaggatttaggctgcagtttaagtccagcagacaagtgtgtggtggggatttacatggccctactggcacatttacttctcccaactacccaaacccaaatcctcatgcccggatctgtgagtggacgatcactgtacaagaaggaaggcggatcgtcctgacgtttaccaacttgaggctgagtacccagccatcttgtaacagtgagcacctcatcgtattcaatggcattagaagcaactcgcccctactacagaaactgtgcagccgtgtgaatgtgaccaatgaattcaaatcttcaggaaacaccatgaaagtggtatttttcactgatggctcccggccgtatggaggcttcactgcttcctacacctctactgaagatgcagtgtgtggtggatttcttccaagtgtctccggtggaaacttttcttctcctggctataatggaatccgtgattatgccagaaacctagactgtgaatggactctcagtaatccaaatcgggaaaattcatccataagtatctattttctagaactttccattgaaagtcatcaagactgtacatttgatgtccttgagtttcgagtaggggatgctgatgggcccctgatagagaagttctgtagcctgtcagcaccaacagcgcccttggtcatcccctaccctcaggtgtggatacacttcgtcagcaatgagcgtgtagaatatactggattctatatagagtactcctttacagattgtggtggaatacggacaggtgacaatggagtgatctcaagtcctaactatccaaacttgtacagtgcatggacccactgttcatggctgctgaaagccccagaagggcacaccatcactctcacattcagtgactttcttctcgaggctcatccaacttgcacttcagactccgtcactgtcaggaatggtgactccccaggatcgcccgtcataggacgatactgtggacagtcagtcccaaggccgatacagtctggttccaaccaacttatagtgacttttaacacaaacaatcaagggcaaactcgtggattttatgcaacatggaccacaaacgctttaggttgtgggggaacattccactcagctaatggtacaatcaaatctcctcactggcctcagacattcccagaaaacagcagatgctcctggacagtgatcactcacgaaagtaaacactgggagattagctttgacagcaatttccgaatccccagcagtgacagccagtgtcagaacagcttcgtgaaggtttgggaaggaaggttgatgatcaataagaccctgttagccacgagctgtggagatgtggctccaagtcccattgtcacatcagggaacattttcactgctgtcttccaatctgaggagatggcagcccagggcttctctgcatccttcattagccggtgcggacgcacattcaatacctcccctggtgacatcatctctccaaacttcccgaagcaatacgacaacaacatgaactgcacctacctcatagacgctgaccctcagtctctggtcatcctgacttttgtgtcctttcatttggaagatcgctcagctatcaccggaacctgtgatcatgatggcttgcacatcatcaaaggtcgtaacctctcttccactcctctcgtgaccatatgtggttctgaaactttgcgtcccctcactgtggacggcccagtgttgctcaacttctattctgatgcatacaccacagactttggcttcaagatttcctacagagccatcacctgtggtgggatctacaatgaatcctctggaatccttaggagcccttcctactcatacagcaactaccccaacaacctctactgtgtctacagcctccatgttagaagcagcagagtgataataattaggttcaatgatttcgatgtggctccttccaacctttgtgcacatgacttcctggaggtgtttgatggtcccagcattggaaatcgatctcttggaaagttctgtggttccacgcgtccacaaactgttaagagcaccaatagcagcctgaccctgctgttcaagacagattcttctcaaacagcaagaggttggaaaatatttttccgggagacaatagggccacagcagggatgtggtggatacctgaccgaggacaaccagagctttgtgtctcctgattctgattcgaatggacgctatgacaagggtctcagctgcatatggtacatagttgcacctgaaaacaaactggttaagctcaccttcaatgtgttcactctggagggaccatcgtcagctgggagctgcgtctatgattatgtgcagatagcagatggcgcaagcataaactcatatttaggtggaaaattctgtggctcccgtatgcctgccccatttatctcttccggcaacttccttacgtttcagtttgtctctgacgtaactgttgaaatgaggggatttaatgcaacatatacctttgtggacatgccttgcgggggaacatataacgcaacctcgacacctcaaaatgcgtcatcacctcatttatccaacatcggacggccatactccacctgtacttgggtcatcgcagctcccccacagcagcaggttcagataactgtgtgggacttacagctgccctcacaagactgctcacaaagctacttagaacttcaggattcagtacagactggtggaaaccgggtgactcagttctgcggtgcgaactatacaaccttgccagtgttctactcctcaatgagcactgcggttgtcgttttcaagtctggagttttaaacagaaactcgcaagtgcaattctcctatcagattgcagattgcaacagagaatacaaccaaacgtttggcaatctgaagagtcctgggtggcctcagaactatgacaataacctggactgcaccatcattctcagagccccgcagaaccacagcatttccctctttttctattggtttcagctggaagattcaagacaatgcatgaatgatttcttggaggtaagaaacggcggcagcagcacctcaccactgcttgacaagtactgtagcaacctgctgcccaacccggtcttctctcagagcaacgaactgtatctgcactttcacagcgaccactcagtcaccaacaatggctatgaaattatttggacctcctctgctgctggctgtggagggactcttttgggcgacgaagggatattcaccaaccctggctttcctgacagttacccgaacaacactcattgtgaatggaccattgttgctccttctggaaggcctgtctctgtcgggtttccctttctcagtatcgactcttctggtggctgtgaccagaactacctcatagtctttaatggtccagacgccaactccccaccctttggaccgttgtgtggcatcaacactgggatagcgcccttctatgcttcatcaaatcgggtctttataaggtttcatgctgagtatacgacacgtctttcagggtttgaaataatgtggagcagctgaatcaggagagctgtgtataaccccaggactctggttctgcccagtgctgtcagatgcaaccctgcccagtactcattctgctgttctcatccccgtctctgcctgcgtcatcaaacatggactgagcttctacagccttgaccagagaaagtgcacgactgacttcatacattaggcgttctgaaggctttgatctactcagctgtgcacaccatctttactggatgccctgtttagccgacatcttctaaaatgttctttaaagggtggaagttatcctggcacattgatgtacggttttaaaacttggtgatacaaatggatgtattgttccactacaaaagtcaaagtgcaggtaataaacattcttcacatgtaaaaaaaaaaaaaaaaaaaaaaa

SEQ ID NO: 472 - DNA, 1582 bp, Rattus norvegicus
gaaagggagcggcggcgggaggcgcggagcgcgggcgccgggaagatgctgcagtccctggccggcagctcgtgcgtgcgcctggtggagcggcaccgctcggcctggtgcttcggcttcctggtgctgggctacctgctctacctggtgttcggcgccgtggtcttctcgtccgtggagctgccttatgaggacctgctgcgccaggagctgcgcaagctgaagcggcgcttcctggaggagcacgagtgcctgtcggagccccagctggagcagttcctgggccgcgtgctggaggccagcaattatggagtgtcggtgctcagcaacgcctcggggaattggaattgggacttcacctcggcgctcttcttcgccagcacggtgctctccaccacaggctatggccacacggtgcccttgtcagatgggggcaaggccttctgcatcatctactctgtcattggcatcccgttcaccctcctcttcctgacggccgtggtccagcgtgtcaccgtgcatgtcacccgcagaccggtcctctacttccacatacgctggggcttctccaagcaggtggtggccatcgtccatgccgttctgctgggattcgtcaccgtgtcctgcttcttcttcatcccggccgccgtgttctccgtgctggaggatgactggaacttcctcgaatctttttacttctgtttcatctccctgagcaccatcggcctgggggactacgttccaggggaaggctacaaccagaagttccgggagctgtacaagatcgggatcacgtgttacctgctcctgggactcatagccatgctggttgtcctggaaaccttctgtgagctccacgagctgaagaaattcaggaaaatgttctatgtgaagaaagacaaggatgaagaccaagttcacatcatggagcatgaccaactgtccttttcctccatcactgagcaggcggccggcctgaaggaggagcagaagcaaaacgagccttttgtggcctcccagtcaccaccctatgaggatggctctgcaaaccattgagcatgggtcaccagaccccggacatgaggcagagcctagactgtgttcatttttacgagaaagtcaaagctaagatgatgttattttaagaaatatctactgttaacaatattttaaaaacacggaactttggatcctgggggagtgggttttaatctctgggcaaatgaggtgtgcacccataactcacaggcaatgtgatcacctgacatcatgcagctgtaactcacaggcgatgtcatcacctggcatcctgcacctgtaactcacaggtgatgtcatcgcctggcatcctgcacctgtaactcacaggtgatattatcacctggcatcctgcacctgtaactcacaggtgatgtcatcacctggcatcctgcacttgtaactcacaggttgatgtcatcgcctggcatcctgcacctgtaactccacagttgatgtcatcacctgggcattacacactggggaagaaatacttgaaacatgttactgcaccggaaatcccattctaaaaccaaacttacta

SEQ ID NO: 473 - DNA, 453 bp, Rattus norvegicus
  misc_feature (1)..(453): n = a or c or g or t
caagaggaaagtggtgtcatggatagatgtttatgcacgtgccacatgccagccaagggaggtggtggtacctctgagcatggaattcatgggtaatgtggtcaaacaattcgtgccaagctgtgtgactgtgcagcgctgtggtggctgctgtcctgacgatggcctggagtgtgtgcccattgggcaacaccaagtccgaatgcagatcctcatgatccagtacccgagcagtcagctgggggagatgtccctggaagaacacagccaatgtgaatgcagaccaaaaagaaaggagagtgctgtgaagccagacagccccaggaccctctgcccacgctgcaccnagcgccgtnagcgccctgatccccggacctgccgttgccgctgcagacgccgccgcttcctccattgccaagggcggggcttagagctcaacccagacacctgcag

SEQ ID NO: 474 - DNA, 353 bp, Rattus norvegicus
tagagcgcgatgaggaaaagggctgagctgagctttggttctccagaatgtaagaagaaaaatttaaaacaaaaatctgaactctcaaaagtctatttttttaactgaaaatgtagatttatccatgttcgggagttggaatgctgtggttacctactgagtaggcggtgactttgtatgctatgaacatgaagttcattattttgtggttttattttacttcgtacttgtgtttgcttaaacaaagtgacttgtttggcttataaacacattgaatgcgctttactgcccatgggatatgtggtgtgtatccttcagaaaaattaaaaggaaaataaagaaactaactggtt

SEQ ID NO: 475 - DNA, 1446 bp, Rattus norvegicus
ttccggcaggaaacgggacctggagagcggaggcctcaggacgagcgcggacacccggagctcgtgggcagcctgaaaagtggggagaagtggcagaccagagctcggggcacaggcctgcaggagcccagctcaagacccctaaccaaggccagaccaaggccagacctgggcaggcacctccatcacagcgccttctgcagtcagaacttgttgctgtccacaggggaaagtaaaacatgacggagacagatggcttctacagaagtagggaagtgttggatccagccgagcagtacaagatggaccacaagaggagaggaactgccctaatcttcaatcacgagaggttcttctggcacctagcactcccagagaggcggggcaccaacgcagacagggacaacccgactcgaaggttctcagagctaggatttgaagtgaaatgctttaacgacctccgggcagaagaactactgctcaagattcacgaggtgtcgacttccagccacgtagatgccgattgcttcctgtgtgtcttcctgagccacggggaaggcaaccacatttacgcatacgatgccaaaattgaaattcagaccttgactggcttgttcaaaggagacaagtgtcagagcctggttggaaaacccaagatattcatcatccaggcctgtcggggcagccagcatgacgtgcccttggttcctctggacgtggtggatcatcagacagacaagctggacgacaacgtgacccaggtggatgctgcctcggtgtacactctgcctgcgggggcggacttcctcatgtgttactctgttgcagaagggtattactctcaccgagagactgtgaacggctcctggtacattcaggatttgtccgagatgctggccaggcacggcagttccctggagttcaccgagctgctcacgctggtgaacaggaaggtctctcagcgccgtgtggatttctgcaaagacccaggtgcaattggcaagaagcaggttccctgctttgcctcaatgctgaccaaaaagctgcatttctgtcccaaacctagtaagtagggccgtccgacttgctacaaatgtttcacacacatttcccttctacacagaggccagctggccaaagactccgcccaccaacggacactgtttgaatttttaaggtgctacagaaaagtaatgttttgcctttgttattattttcaatcatgttggggatggggaaggctaaagaaatctaggaaattactgtgcgcaaatgcccaatacatttattatgtttctggtaaatggcaagattactaagaataccaactactttgccttaccttttgtgacactatttatataggctcattgtataatgtttttaaagatctttgaaactcaagaatgagatcgttttctcctaataaaaatgtctaaaacccgg

SEQ ID NO: 476 - DNA, 3312 bp, Rattus norvegicus
atggacattcggaaattctttggggttatatcaagtggaaaaaagcctgtaaatgagacagtaaagaagaatgagaagacaaaaccttcggagggaactgtcaaaggaaagaaaggagtaaaggttgccaaggttaataatccctgcaaagaggatgcctccagaccaaagcagcacacagaaaaacgaggatcatctatgactcagattcagaatcagaggagacacgtgcaagtgaaagatgctaaaaagaaatcagaaaaattgccacgtgtgcttgtaaacctggtaaatctctcggaaggatcctcgttacctcatatttctgagacagatgaagacgcagtgactttttatgtaaaaaggcagcctccaaatcaaaagagaatggagtatctacgaaacagttaccttggagcatcaaacgtgaaaaagaatgaagaaaacactaagactaagagtaaaccgttatcaccaataaaactaacaccgacatcagtgcttgattattttggaactgaaagtgtccagagatctgggaagaagatggtggcgagcaaaaagaaagagtcttctcaaaccccagatgattccagattaaatgatgaggccatcgccaagcagctgcagcttgatgaagatgcagagctggagaggcagttgcatgaagatgaagaatttgcaagaacactggccttgttggatgaagaacctaagaccaaaaaggctcgaaaggactctgaagagggagaatcattttcacctgccaaagctgagttaagcaaagcagcaaagcagaagagccctgctaacgagcatttctcaattggaagaaagacctacagtcctgctaagtacggcaagggtagaggctcagaaggcaccaagcagccctgcagatcagctcaccagacggaagcctgctcctctctcaaggccagctccaagctggctcttatgaaagcacaagaagaaaactctcacacagacacagaactgctggctgcaaaaagagaaagtgccattgagcccaaaggagagaaaacaactcctaggaaaacgaaaggctctccaactaaaagagagtctgtaagcccagaagattctgaaaagaagcgcaccaattatcaagcttatcgaagctacttaaatcgagaaggtcccaaagccctgggctccaaagaaatacccaagggagctgaaaactgcttggagggcctgacgttcgtgatcaccggagtgctggagtccatcgaacgagaagaagccaagtctctaattgaacgttatggggggaaagtaacaggaaacgtgagcaagaaaaccagctacctcgtcatgggccgggacagcaggcagtccaagagtgacaaggcagcagctctgggaacaaaaatccttgatgaagacggcctgttggatctgattcgaactatgccgggcaaaaaatccaagtacgaaatcgctgctgaggctgagatgaagaaagaaaagtccaaattggagagaacaccccaaaaaaatgatcagggaaaaagaaaacttagtccaaccaagagggagttggagcctaaaaagagcaagctgactccccttaagcacagccctcggaaggcagtgaaggaggaggaacgtgtgtgtccgaggggcttggacgccaaggagcctcatggcagccacagtgccagcagagaggagtgcctgctctgggtggataagtacaagcccacctcactcaagaacataatcggacagcagggtgaccagagctgtgccaacaaactgctacgctggctcagaaactggcacaagagttctccagaagagaaaaagcatgcaaaatttggcaaagttgccagcaaagatgatggctccagtttcaaggcagcactgctgtctggccctccaggtgttggcaaaaccactacagcttctcttgtgtgtcaggaattgggctacagttatgtggaactaaatgcgagtgatactcggagtaagaacagtctgaaagcaattgttgctgagtcattgaacaacaccagcatcaaaggcttttatacaagtggagcatctccttctgtaagtgcgaggcatgctctcatcatggatgaagttgatggcatggcgggcaatgaggacaggggtggaattcaggagctaataggcctgataaagcatacgaaaattcccatcatttgtatgtgcaatgatagaaatcaccccaaaatccgctcattggttcattattgttttgatcttcgtttccaaagacctcgagttgaacagattaagagtgcaatgctgtctattgcatttaaagagggattaaagatcccacctccagctatgaatgaaataattttgggagctaatcaagatgtcagacaggttttacacaatctcagtatgtggtgtgcacagagtaaggtcctaacctatgaccaagccaaggctgattctcagagggccaagaaggacatcagattgggcccatttgatgtcacccggaaagtgtttgcagctggagaggagactccacacatgtcactgatggacaaatcggatctctttttccatgactattccattgcacccctctttgtccaggagaactacctccatgtaaagcctgtggctgcagggggtgacatgaaaaagcacttgatgcttttaagccgggcagcagatagcatatgtgacggtgacttagtggccaatcagatccggagtaagcaaaactggagtctctcccacacaggccatttacgccagcgttgttcctggagagttgatgaggggctacatgtctcagtttcccagcttcccaaggctggctgggaaagcactcgtctatgggcaagcactgatcggactgttcaggacctgtccttgcacatgagtcttagaacttactccagcaaaaggacagtgaacatggattacctgtcacacatcagagacgcacttgtacgacccttgacctcacaaggagtagaaggggttcagcgtgttgtcacacttatgttggtgaaagaagattttgacaacatcatggaagttagcagcgatacatactattgggggggcaagcccagtaccttttccaagctggaccccaaggtgaaagcagccttcacaagagcctataataaggaggcccacctgaccccatactcacttcaggtggtaaaggcatcgaggcccagcataggtccagcactggattctgagtacaatgaagagtcacaggaagatgccactcagtctgatgagaaagagcaggatgccctagagactgacgccatgatcaag

SEQ ID NO: 477 - DNA, 2128 bp, Rattus norvegicus
gtcacgggaagatccgtcgcgccgaggacgctggttagtctcgctttgggttccggctgcgtcgggcgtgcgtgtagctcgctagaactatggcgtccgggcctcacccgacatcgaccgctgccgccgcctctgcctcgtccgccgccccgagtgcgggcggctccagctccggcacgacgaccacgacgacgacgacgaccggagggatcctgattggcgaccgcctgtactcggaggtgtcgcttaccatcgaccactcggtgattccggaggagcggctctcgcctaccccgtccatgcaggacggcctcgacctgcccagcgagacggacctgcgcatcttaggctgcgagctcatccaggccgccggcattctcctccggctgccgcaggtggcgatggctacggggcaggtgttgtttcatcgttttttctactccaagtctttcgtcaaacacagtttcgagattgttgccatggcctgtattaatcttgcatcaaaaattgaagaagcaccaagaagaataagagatgtgattaatgtattccaccacctccgccagttaagaggaaaaaggactccaagccccctgatccttgatcagaactacattaacaccaaaaatcaagttatcaaggcagagaggagggtgctaaaggagttgggattttgtgttcatgtcaagcatccccataagatcattgtaatgtatttacaagtcttagaatgtgaacgtaaccaaaccctggttcagactgcctggaattatatgaatgacagtcttcgaaccaatgtttttgttcgctttcaaccagagactatagcatgtgcttgtatctaccttgcagctagagcacttcaaattccattgccaactcggccccattggtttcttctttttggtaccacagaagaggagattcaagaaatctgcatagagacacttagactttataccaggaaaaagcctaactatgaattgctggaaaaggaagtagaaaaaagaaaagtagccttacaggaagccaagttaaaggcaaagggattgaatcttgatggaactccagccctttccactttaggtggtttttctccagcctccaaaccatcatcaccaagagaagtaaaagctgaagagaaatcaccagtttccattaatgtgaagacagtcaaaaaagaacctgaggatagacaacaagcttccaaaagcccttataatggtgtaagaaaagacagcaagagaagcagaaacagcagaagtgccagtagatcaaggtcaagaaccaggtcacgctctagatcacacaccccaagaagacattataataataggcgaagtcgatctggaacatacagctcaagatcaagaagcaggtctcgcagtcacagtgaaagtcctcgaagacatcataatcatggttctcctcaccttaaggccaaacataccagagaagatttaaaaagctcaaatagacatggtcataaaaggaaaaaatctcggtctcgatctcagagcaagactcgggatcactcagatgttaccaagaaacacaggcatgaaagggggcatcacagagacaggcgtgaaagatctcgctcctttgagaggtcccataaaggcaagcaccacggtggaagtcgctcaggacatggcaggcataggcgctgactttcatcctctgacactgcatcggtccctggtgttgcccatatgcagtgtgacgatgtatggactcaatcaaaacatgaaaagcaaactgattagggattgatttattaaaattgtctaggtttctagaaacactgaggacattttcttttgaaaagaactatgttaaggttttttgcacattaaaatgccctagcagtatctaattgaaaaccatggtcaggttcaattgtactttattatagttgtgtattgtttattgctataagaactggagcgtaaattctgtaaaaatgtatcttatttttatacagataaaacttgcagacactgttctatttaagtggttatttgtttaaatgatggtgaatactttcttaacactggtttgtccgcatgtgtaaagatttttacaaggaaataaaatacaaatcttgtttttctaaaaaaaaaaa

SEQ ID NO: 478 - DNA, 1607 bp, Rattus norvegicus
cctcgagcggcggcggcgcaggtctcccggccaagtccccacttctggctgctcatgccactgggactggggcgaaggaaaaaagcaccacctctggtggaaaatgaggaggcggagccaagccggagtgggctgggcgtcggggagcccgggcccctgggtggaagtggagcaggggaatcccagatgggtttgcccccacctcctgcttccctccggcctcgcctcgtgttccatacccagctggcccacggcagccccacgggccgcatcgagggcttcactaatgtcaaggagctgtacggcaagatcgctgaggccttccgactaccggctgctgaggtgatgttctgtaccctcaacacccataaagtggatatggacaagctgctggggggccagatcgggctggaggacttcatctttgcccatgtcaaggggcagcgcaaagaggtggaagtattcaagtctgaggatgctctggggctcaccatcaccgacaacggggccggctatgccttcattaagcgcatcaaggaaggcagtgtgattgaccacatccagctcatcagcgtgggtgacatgattgaagccatcaacgggcagagcctgctgggctgtcggcattatgaggttgccaggctcctcaaagagctgccccgaggccgcaccttcaccctcaaactcaccgaacctcggaaggcgtttgatatgatcagccagcgttcatcaggtggtcaccctggctcaggcccacaactgggcactggccgagggaccctccggctccgatcccggggccctgccacagtggaggatctgccgtcagcttttgaggaaaaggccattgaaaaggtggatgacttgctagagagctacatggggatcagagacacagagctggctgccacgatggtggagctggggaaagacaaaaggaacccagacgaactggcagaagctctggatgaacggctcggtgacttcgcattcccagatgaattcgtctttgatgtctggggagccatcggggatgccaaggttggccgctactaagactgggactgaacctggaccttgagataacctgctttgcccagctggggtttccagaaaccacagccaagacctgggctgacagcttaggctgtaactccgcagcctggggatggcacaggctgcaagtgccctgtggtccaggccccgctccaatcagtaccgccacggtgcccagcctggttggggtccccggccaacccctgccgggttccccacctacctcaatagagtaagcgcatggggagggaccaacacactaggcagccagccacctctatccccaacacttcccactatcagctggcaactgccccttctgtccccctggcctcagctctcttcggggtcatgacctccctactttactttttttgctttgtttttttcaagacaaagtcactatgtagctctggctgtcctggaactccttctgtaaaccaggctggccttgaactcacagagatccacctgcatctgcattcacagtgctgggaataaaggtgtgcatcaccactcccaaaaaaaaaaaaaaaaaaaaaaaaaaaaaa

SEQ ID NO: 479 - DNA, 3059 bp, Rattus norvegicus
ccgcgtcgacccggcacaaacacaccatgcaccctgacagtaaatttataaaaaatttttttcaactatagcacaaaaaatgtgtatcacttaacagggatgacaaatggctgtcacttcagtcactataatgcacaatatatatatgccttctacttatgaagcacgtttactggaaaacaactgttatgcagacggcatcctcatttttcttatgtttggtctcttgtcccttgagagatcatgtccagtaagggatctacaacagttccttgtgtgtgttaacaatgatgaaatcacaattgatgtgttttcctgagtctgtccccacagttaaacaatgcctttctccccggggcgccgcgcccggccggcgcctccgcttccagccaagatggcggagagcggcgaggctctgggtacggtcccggagcacgagcggatcttgcaggagatcgaaagcacggacaccgcctgcgtagggcccacccttcggtctgtgtatgatggtcagccaaatgcacacaagaagttcatggaaaagctagatgcctgcatccgcaaccatgacaaggagattgagaaaatgtgtaacttccatcaccagggctttgtagatgctatcacagagctcctcaaagtaagggcggacgcagaaaagctgaaggtccaggttactgataccaaccgaaggttccaagatgctggaaaagaggtgatagaacaaacagaagatattattcggtgtagaattcagcagagaaatattacaaccgtagtagagaaattgcagttatgcctgccagtgttggagatgtacagtaaactgaaggaacagatgagcatgcagaggtattattctgcacttaaaacaatggaacagttagagaacgtatactttcctcgggttagccagtaccgcttctgtcagctcatgatggacacacttcctaaactccgggaggatatcaaagacatctccatgtctgacctcaaggactttctggaaagcattcgaaagcattctgacaaaataggggaaacagccatgaaacaggcacaacagcagaagagcttcagtattgctgtacagaagcaaaccaatatgaggtttgggaaaaatatgcatgtaaacaatgacaggactctagaggaaaagagtgacatcatactgaagcacacacttgaggaggaggccgagaatgacgaggaggtcttaactgttcaagatctcgttgacttttcccctgtttaccgatgctcacacatttattctgctttgggtgatgaagaaacatttgaaaattattaccggaagcaaaggaagaagcaggcgcgcctggttctgcagccgcagtcgagtgtgcatgaaacagttgatggctatagaagatatttcactcagattgtagggttctttgttgtggaagatcacattttacatgtgacccaaggattagtaaccagggcatacactgatgaactctggaacatggccctctcaaagataattgctgtcctcagagctcactcatcttactgcactgatcctgaccttgttctggagctgaagaatctcatcgtcatttttgcggatactttgcagggttatggcttttctgtcaaccgactctttgaccttctatttgaaataagagatcaatacaacgaaacactgcttaagaaatgggccggtattttcagggacatttttgaagaagataactacagccctattcctattggcagtgaagaagaatataaaatggtcatcagtaaattccccttccaagatccggaccttgaaaagcaatccttcccaaagaagtttcccatgtcccagtcagtgcctcttatttatattcaagttaaagaatttatttatgccagtcttaaattctcagagtcactacaccgaagctctacagaaatagacgatatgcttaggaagtcaacaaatctgctgctgaccaggattctgagtagctgcttactgaacctcattagaaaacctcacataggtttgacagagctggtgcaaattatcataaacacaacacacctggagcaggcttgcaaatacctggaggactttataactaacattacaaatatttctcaagaaaccgttcacaccacaagactttatggactttctacttttaaggatgcacgacatgcagcggaaggagaaatatataccaaactcaatcagaagattgatgagtttgtccagctggccgactacgactggaccatggctgagtcggatgggagagcaagtggttatttaatggatcttattaattttttgagaagcatctttcaagtatttacccacttgcctgggaaagttgcccagacagcttgcatgtcagcctgccaacatctgtccacatccttgatgcagatgctcctggacagcgagttaaagcagatcagcatgggggccgtacagcagtttaacctagacgtcatacagtgcgaattgtttgccagctctgagcctgtgccaggattccaaggggacaccctgcagctggccttcattgacctcagacagctccttgacttgtttatggtttgggactggtctacttacctggctgactatgggcagccagcttccaagtacctccgggtgaacccacacgccgcccttacgcttttggagaagatgaaggacaccagtaagaagaataacatatttgcccagttccggaagaacgaccgggacagacagaagctgatcgagacagtggtgaaacagctcagaggcttggtgaccggtatgtcccagcacatgtagaccagatccatgcccgagtgcttctctgtggccagcaccggtcatgagacaataatttgtttacagaagccaaaaactgtagtagaggaaagatactaatgagggcttaaacaataaggacagcaaacatcatttgtatggacttttaataactgaatactattttatatataaaaatgtaacattaattttttccaattttagaagaaaagtcaaaagtgtaatatataaacccaataaattgtgtatg

SEQ ID NO: 480 - DNA, 1892 bp, Rattus norvegicus
cgggcgggcttagctggtaccaggatggcggcggccctggcgtgggtcctggcggcgcctggtgcgagttcctgagctgctaccaggcaggtgacacttcctgtagcccccagcatgcgggcaggactgggtcccatcatcacactggccctagtgctggaggtagcatgggcctcggagcttaagcccacagcgccgcccatcttcaccggccgaccctttgtggtagcatggaatgtacccacacaagaatgtgctccgcgccacaaagtgcccctggaccttagggccttcgatgtggaggctacacctaacgagggttttttcaaccagaatatcaccaccttctactatgaccgtctaggcctgtatccacgttttgatgcagctgggatgtctgtgcatggtggcgtgcctcagaacggtagcctctgtgcacacctgcccatgctgaaggaagctgtggaacgctacattcagacccaagagcctgcggggctggcggtcattgactgggaggaatggcgaccagtgtgggttcgaaactggcaggagaaagatgtgtaccggcagtcttcacgccagctggtggccagtcgacaccctgactggccatcagaccgaatagtgaagcaggcgcagtacgaattcgagttcgctgctcggcagttcatgttgaacacactccgttacgtcaaggcagtcagacctcagcacctgtggggcttctacctctttcctgactgctataatcatgattacgtacagaactgggatagctacacaggccgctgtcctgacgtggaggtggcacaaaatgaccagttggcctggctctgggctgaaaatacagctctctttccctccgtgtacctggacaagacgctggcatcctccaaacacagccgcaactttgtcagcttccgtgttcaggaagcccttcgtgtggctcacacccaccatgcaaaccatgcactccccgtgtatgtcttcacgcgtcccacatatacccgaaggctcacagaacttaaccagatggacctcatctctaccatcggtgaaagcgccgccctgggctcagctggtgttatcttctggggcgactcagtgtacgcttcaagtatggaaaactgccagaacctcaagaagtacctaacgcagacgctggtcccctacatagtcaatgtgtcctgggccacccagtactgcagttggacccagtgccatggccatgggcgctgtgtgcgccgcaatcccagcgccagtaccttcttgcacctcagtcccagcagcttccgcctggtgcctggccgcacgcccagtgaaccccagcttcgacctgagggggagctcagcgaagatgacctcagctacctgcagatgcactttcgctgccactgctatctgggctggggtggtgagcagtgccagtggaaccataaacgggcagctggggatgccagtagagcctgggctggagcccacctcgccagtctcctgggtttggtagctatgactctcacctggaccttataagggatctctccccgcagatagcagtccagctggcctctggcacaaggatctccttggcacaaggagcctgttagggggtaggcaaatgagtctggagttggagtgggcagtacccccaggatgcctagaagagcatccataccacctgtcacccccctgttctaagggggagagaaacatcccctgagatgccctcatcttgccagagaagacgaggatacagttaggccggggaaggcctacctctactctctgttcctggatagtttataatcttggggtctcttttgtaaattaaatacaaaacaactgcaaaaaaaaaaaaaaaaaaaaaaaaaaaaaaaaaaaaaaaaaaa

SEQ ID NO: 481 - DNA, 873 bp, Rattus norvegicus
gaggcgaggagtcggtagcccagcgccgcccgggactcactgtggccgcgcgccactacttccgaggttcaggccgtcgccggcaccatgtctggctatcctaaaagctataatcctttcgacgatgatgtggaagacgaggacacccggccggcgccgtggaaggacgcccgcgacctgcccgacggccccgacccgcctattgacaggcagcagtacctgagacaagaggtgttacgtgggccgagcgctactgctgccagcaccagcaggtccttgttcctcatgtatgaatcggagaagatcggagtcgcctcttcagaggagctggtccggcagcgaggagtcctagaacacacggagaagatggtggacaagatggatcaggacttgaagatgagccagaaacatatcaacagcatcaagagtgtgtttggaggattcatcaactacttcaaatccaaaccagtagagcctccacctgagcagaatggcagcatcgtcccccagcccagcagcagattgaaagaagccataaatacaagtaaagatcaggaaagcaagtaccaagccagccacccaaacctcagaaggctacatgatgcagaactagactctgttcctgcttctactgtgaatactgaggtttacccaaagaactcaagccttagagcttatcaccagaagattgacagcaacctagatgagctgtctgtgggattgggccgcctaaaggacatagccttaggaatgcagacggaaatcgaggagcaggatgacatccttgaccggctaacaaccaaagtggacaagttagatgtcaatataaaaagcacagaaaaaaaggtgcggcaactctagagacacgaagac

SEQ ID NO: 482 - DNA, 2539 bp, Rattus norvegicus
cggtgcctgtgagtaaatagatcagggtctccttcacagcacattctccaggaagccgagcaaacattagtgctattttacccaggaggaaatctaggtgtagagagctctacggatctaaggtttggatctgtacccagtgcttttttaggtgtctttagacatttctcaggaagatgtagtctctgtcaccatgtgtggctgaattctagctcagtccatcttattgtgtttaaggtagttgaagtttaggaaccaaccagtatgtctctgagcagaagagtacagtgtccatcttgaggacaagctcatctttaccattagagggctggccttggcttagattctaccgagaacatactctctaatggctgccctcagttttctctgtttgctgtcttatttgtgtcatggccagaagtcatatggatggctctatgtgagcaaggacccagatagaagagtgtatttgggggaacaggttgccctaacagagagtcctgtgggattcatgcagtcaggatgaagacctgatcagacagagtgtgctgagtgccacggctaaccagagtgacttgtcactgtccttcaggtcaacaccatggttcaacttcaagtcttcatttcaggcctcctgctgcttcttccaggctctgtagattcttatgaagtagtgaagggggtggtgggtcaccctgtcacaattccatgtacttactcaacacgtggaggaatcacaacgacatgttggggccgggggcaatgcccatattctagttgtcaaaatatacttatttggaccaatggataccaagtcacctatcggagcagcggtcgatacaacataaaggggcgtatttcagaaggagacgtatccttgacaatagagaactctgttgatagtgatagtggtctgtattgttgccgagtggagattcctggatggttcaacgatcagaaaatgaccttttcattggaagttaaaccagaaattcccacaagtcctccaacaagacccacaactacaagacccacaaccacaaggcccacaactatttcaacaagatccacacatgtaccaacatcaaccagagtctccacctctactccaacaccagaacaaacacagactcacaaaccagaaatcactacattttatgcccatgagacaactgctgaggtgacagaaactccatcatatactcctgcagactggaatggcactgtgacatcctcagaggaggcctggaataatcacactgtaagaatccctttgaggaagccgcagagaaacccgactaagggcttctatgttggcatgtccgttgcagccctgctgctgctgctgcttgcgagcaccgtggttgtcaccaggtacatcattataagaaagaagatgggctctctgagctttgttgccttccatgtctctaagagtagagctttgcagaacgcagcgattgtgcatccccgagctgaagacaacatctacattattgaagatagatctcgaggtgcagaatgagtcccagaggccttctgtggggccttctgcctgggattacagagatcgtgactgatttcacagagtaaaatacccattccagctcctgggagattttgtgttttggttcttccagctgcagtggagagggtaaccctctaccctgtatatgcaaaactcgaggttaacatcatcctaattcttgtatcagcaacacctcagtgtctccactcactgcagcgattctctcaaatgtgaacattttagaagtttgtgtttccttttgtccatgtaatcattggtaatacaagaattttatcttgtttattaaaaccattaatgagaggggaataggaattaaaagctggtgggaagggcctcctgaatttagaagcacttcatgattgtgtttatctcttttattgtaatttgaaatgttacttctatccttcccaaggggcaaaatcatgggagcatggaggttttaattgccctcatagataagtagaagaagagagtctaatgccaccaatagaggtggttatgctttctcacagctctggaaatatgatcatttattatgcagttgatcttaggatgaggatgggtttcttaggaggagaggttaccatggtgagtggaccaggcacacatcaggggaagaaaacaatggatcaagggattgagttcattagagccatttccactccacttctgtcttgatgctcagtgttcctaaactcacccactgagctctgaattaggtgcagggaggagacgtgcagaaacgaaagaggaaagaaaggagagagagcaggacacaggctttctgctgagagaagtcctattgcaggtgtgacagtgtttgggactaccacgggtttccttcagacttctaagtttctaaatcactatcatgtgatcatatttatttttaaaattatttcagaaagacaccacattttcaataataaatcagtttgtcacaattaataaaatattttgtttgctaagaagtaaaaaaaaaaaaaaaaa

SEQ ID NO: 483 - DNA, 1039 bp, Rattus norvegicus
gaaacgcctcctcgttttgctcagcatggcacatttgagtatgaatattctcaacgatggaagtctttggatgaaatggaaaaacagcaaagggaacaagttgaaaaaaacatgaaggatgcaaaagacaagttggaaagtgaaatggaagatgcctaccatgaacaccaagcaaatcttttgcgccaagatctgatgagacgccaggaagaattaaggcgcatggaggaacttcacagtcaagaaatgcagaaacgtaaagaaatgcagttgaggcaagaggaggaacggcgtacaagagaggaagagatgatgattcgccaacgtgagatggaagaacaaatgagacgccaacgagaagaaagctacagcaggatgggctacatggatcccaagagaaagagacatgagaatgggtggtggtggaacaatgaacatgggagatccctatggttcaggaggccagaaatttccaccgctaggtggtggtggtggcataggttatgaagctaatcctggagttccaccagcaaccatgagtggttccatgatgggaagcgacatgcgtactgagcgctttgggcagggaggtgcgggtcctgtgggtggacagggtcctagaggaatggggcctggaacgccagcaggatatggtagagggagagaagagtatgaagggccaaataaaaaaccccgattttagatacttaggctttcattccagtttggttttgtcttcttgtttagataccacttaaattcttggcattttagtaagaaagctacctttttatggatgttagcagtttattgacctgatatttgtaaatggcctgtttgggcaggtaaaattatgtaacgcagtgttcaaaacaggagaaaaattttttcatttactttttttttaactgtataatgtttctcaagttaatggcagtgtaccttgtgccactgaatttccaaagtgtaccattttttttttactgtgcttcaaataaatagaaaaaaatagttatgaacaaaaaaaaaaaaaaaaaaa

SEQ ID NO: 484 - DNA, 889 bp, Rattus norvegicus
tgaacacccgagcggaccgcagtgcaggcggcagccaccagggccaacacctctcagcatctctactacacgtgtcactgagcaacctctccatgaagccgccctccacgcagagcagccccgcggccgtggcggccgcagccccggccatggactccgcggccgctgcagacctgacggacgtgctgtgcgagttcgacgcggtgctggccgacttcgcgtcgcccttccacgagcgccacttccactatgaggagcacctggagcgcatgaagcggcgcagcagcgccagcgtcagtgacagcagcggcttcagcgactccgagagtgcagactcgttgtacagggacagcttcaccttcagtgatgagaagctgaattctccgacggactccactccagccctcttgtcctccgctgtcactcctcggaaagccaaattaggtgacactaaagagctcgaagacttcatcgctgatctggacagaaccttagcaagtatgtgaagcaaggagtttgagattcttatgccacaagagtgaaactccagaaggctacgccaggccctggcaaaatcggctactaagtctgctgtgggagcgggcagagctcgcggcatccggccgttcttggttcgccataactttagccattgggtccatctctgggcagttcagataatgaggctgactttgtttacctgcctgcaccatattcaacagatgatctatctaatgtgtttttactccttaaacatagctcttctataaattaaagtgcttttatggaaatatttgtaattacttatatatagttggaggtcataataagctttcccatcataatatatttttgtatacaaataaaatttaaactgggatctgtacct

SEQ ID NO: 485 - DNA, 2381 bp, Rattus norvegicus
gcgaatggcagcctccagaaagccgccgcgagtaagaccacaggatggctccgaaggtgacctcagagcttctgcggcagctgcgacaagctatgaggaactcggagtgcgtggcagaacccatccaggcctacatcatcccatcgggagacgcccaccagagtgagtacattgcaccctgtgactgtcggagggcgttcgtctccggcttcgatggctctgcaggcacagctatcatcacggaggagcatgcggccatgtggacggatgggcgctactttctccaagctgccaagcagatggacaacaactggaccctcatgaagatgggtctgaaggacacaccgactcaggaggactggctggtgagtgtgcttccggaaggatccagggttggtgtggaccctctcatcattcccacagattactggaagaagatggccaaggtacttcgaagtgctggtcaccacctcgtgcctgtgaaggagaaccttgtggataagatctggacagaccggccagagcgcccttgcaagcccctcctcacactgggtctggattatacaggcatctcgtggaaggagaaggttgcagaccttcggttgaaaatggcggagaggagcatcgtgtggtttgtggtcactgccctagacgagattgcatggctgttcaatctccgagggtcagatgtggagcacaacccggtgtttttctcctacgcaatcataggactagagaggatcatgctcttcatcgacggggaccgcattgatgcgcctggtgtgaaacagcacctgctccttgacttgggcctggaggcagaatataaaatccaggtgctgccttacaagtccatcctgagtgaactcaagaccctgtgtgctgacctgtccccgagggagaaggtgtgggtcagtgacaaagccagctatgctgtgagcgaggccatccccaaggatcatcggtgctgtatgccttatacgcccatctgcattgccaaagccgtgaagaactccgccgagtcagcaggcatgaggcgggctcatattaaagatgccgttgccctctgcgagctcttcaactggctggagcaagaggtccccaaaggtggcgtaacggagatctctgcagctgacaaggctgaggaatttcgaagacaacaggctgactttgtggacctgagcttcccaacgatttccagcacgggacccaacggcgccatcattcactacgcgccgatccctgagacgaataggaccctgtccctggatgaggtgtatctcattgactccggtgctcagtacaaggatggaactacagacgttacccggaccatgcacttcgggacccctactgcctatgagaaggagtgtttcacgtatgtactgaaaggccacattgctgtgagcgcggctgttttcccaacgggaaccaaaggccaccttctagactcctttgcccggtcagccctgtgggattccggcctggattacctgcacggaacaggacacggcgtcgggtctttcctgaatgttcacgagggcccttgtggcatcagttataaaacgttctctgacgagcccttggaagccggcatgatcgtcactgatgagccagggtattatgaagatggggcgtttgggatccgcatcgagaacgttgttttggtggtccctgcgaagaccaagtataatttcaataaccgaggaagcctgacctttgaacctctaactttggttcccatccagaccaaaatgatagatgtggatgctcttacagataaagagtgtgactggctcaacagctaccaccagacctgcagggatgtgattgggaaggagctgcagactcaaggccgccaggaagctctcgagtggctcctcagagagacagagcccatctccaggcagcattgataccgtctagcgtttgtttttgtaggatgctctggggaaggaagacacatggcagaccctgacttctttctcctcacctcctcctcctccccaactcccctttttacttttagacactaagaagggcagaaactcttcttatccactttgatattttcttgcaaacagtcttttatgaatttttaattgttgagaatgagccaggaataaaactgctacaccagaaggaggggcctcacaaagcgaagccttgacaagggggagatacccgagccctctggccagcggtggccagcggtgactgctctgcgatggtctccttccaggtgctggtacctcagtcgcggtcaccctgacgttcatgagaccctcctatgatcagtgaataaaatactaaactcggaagagatgagtgcctatggtgtgtacagataaccctctgattttgtgggtttctgagcggcc

SEQ ID NO: 486 - DNA, 4131 bp, Rattus norvegicus
ctcggagaaagacaggccggccatcaggaaaacaaacaagcctcagcaacatctaaacccttgaaaggatcctgagagaggggggaaagggaaaacagcagccaccagcccaaccacttgtgtcttctgcccctccccacctatcttgcccaccccaccagcccacgctgcttgggacttgaaatctgtggccgaaggaccgtcaccacataacttcaaaaataatcaaccaccctccctacccaaacccacccaatctcactcatccagcatttcctttttggagtccactcagaatttttttcaacgaccccctctccctaatggagttgggtggggggaaaatgaaaactgagttggtctttacttttttaagagactttttgatccaatgaggccccacaagtaactgagtttgggtcctggttggttgttttattttttttcctccaaaattttacccctcccccctgagcccgaggtgctgacgtcgcaaaaaaattggataaagccaccatcatgggttcaggacccatagaccccaaagaacttctcaagggcctagatagcttccttactcgggatggagaagtgaagagtgtggatggaattgccaagatcttcagtctaatgaaggaggcacgaaagatggtgagtcgatgcacgtacttgaatattatcctgcagacccgggcgccggaggtgctagtcaagtttattgacgtcggcggctacaagcttctgaacagttggttaacgtattcaaagacgaccaacaacattcctctcctacagcagattctgctgactctgcagcacctcccactgactgtggaccacctcaagcagaacaacacagcgaagctagtgaagcagctcagcaagtcaagcgaggacgaagagctccggaaattggcatcagtccttgtcagtgactggatggctgtcatccgctcccagagtagcacccagcctgcagagaaagataagaagaaaaggaaggaagaggggaaaagtcgaaccacgcttcctgagcggcctttgactgaagtgaaggctgaaacccgggctgaggaagccccagagaagaagaaggagaagcccaagtcacttagaactacggcacccagtcatgccaagttccgttctactggactggagctggacaccccatctttggtgcctgtgaagaagaactccagcactgtggttgtgtcagacaagtacaacctgaagcccatccccctcaagcggcagagtgccacagctgctccaggcgatgctgccccgcctgcagagaagaagtacaagcccctcaacacaacccccaataccaccaaagaaattaaagtgaagatcatccccccacagcccatggagggcctcggttttctggatgctctcaattccgcccctgtcccaggcatcaaaattaagaagaagaagaaggttctatcacctactgctgccaagcccagcccttttgaagggaaaacaagcactgagccaagcacagccaaaccttcctccccagagcctgcagcccccgctgagcccatggacacagaccgtcctggcacccctgtccccgctgtggaagtcccggagctcatggatgcagcctcttcggagccaggagctctggatgcaaagcctgtggaaagccctggagatcccaaccagctgactcgaaagggcagaaagagaaaaactgtgacgtggcctgaggagggcaagctgagggagtatttctacttcgaactggatgaaactgagcgagtgaatgtgaacaagatcaaggactttggggaggctgctaagcgtgagatactgtcggaccgacatgcttttgagacagcccggcgactaagccatgacaatatggaggagaaagtgccctgggtatgtcccaggcctctggttctgccctcacctcttgtcatccctggaagcaacagccaggagcgatacatccaggctgagcgggagaagggcatccttcaggagctcttcctgaacaaggagagtcctcacgagcctgatcctgagccgtatgaacccattcctcccaaactcatccccttggatgaggagtgcgccatggatgagactccgtatgttgagaccctggagcctggagggtctggtggctcacctgatggagcaggaggctccaagctgcctccagttctggccaatcttatggggagcatgggagcagggaagagcccccagggccctggaggcggtggcatcaatgttcaggagatcctcacttccataatgggcagtccaaacaaccacccttcagaggagctgctgaaacagccagactactcagacaagctgaagcagatgctggtgccacatgggctcctaggtcctggtcctgtagccaatggcttcccaccaggaggccctgggggccccaagggtatgcagcatttcccccctggtcctggagggcccatgccaggtccccatggaggccctggtggaccagtgggtccacgtctcctgggtcccccaccaccttctcggggaggtgatccattctgggatggcccaggtgaccccatgcgaggtggcccaatgcgtgggggtccaggacctggtcctggaccataccacagaggccgagggggtcgtggaggaaatgaaccgccaccaccccctccattccgaggagccagaggaggtcgttctggaggaggccccccaaatggccgagggggtcctggtggaggtggcatggttggaggtggtgggcaccgcccccatgaaggccctggagggagcatgggcagtggacatcggtctcatgagggccctggagggagcatgggcagtggacatcggtctcatgaaggccctggacacgggggaccccatggccaccggccacatgacgtccctagccatcgaggccacgaccatcgagggccaccacctcatgaacaccgcggtcatgatggccatgggggaggcggccaccgagggcatgatggaggccacagtcacggaggagacatgtcaaaccgccctgtctgccgacacttcatgatgaagggcaactgccgctatgagaacaactgtgccttctaccacccaggggtcaacgggcccccactgccctaggcctgcctgccctacccgcacccctgtggactgcagctttgctccttccacttggttatggcttctgtgaggcccactttccttttccccagctgatgaggagccggccccctcagttcccacctggttgggtttctgggggtttctgattcctggtgtgcattgatgtacatattccctccagtctggagcggagaggagagagactggactgctgagacggctggcttcactttgtgaggagatttgccctgtgccccaaaccccttccagtattagccccgatgcctgagaacctgaagccggccaccctggagacctctgctctccacatgcacacggaactgagttggtcagctgcacttaggaaaccgtccaagctaagctcattatcttcacagggtgagggggtggtgaggggtaccatatatcccactgcactgagggctcaagctggctgaagctgagttctggaactaccccccacttgtgccccacatgggccagtcactgttgagtcctttctcaagaaggactgcaactgttacttcccaggtcatcgtgggtctgctaggttcagtgatggcacattcatatctgtgtccagtggaagttgtatctggcagaggggtggcctgtagtgttgggccactcttgcctacagccattttcgagactccgtgaggccagctttcattaactttagccgggtataccgggcctgacgcactacatgcactgcctttgggagtgggctggctccttaccccgtaaggagccctgtcagtgaggcttcctgggtagactcagcaggaggggcccttcccagtcctctcctccccctgtcttggcatcagttgttttctatgaaaacagtgggttggttttgtgcagggtcttgggttagaaccaatggatttgaggagttttttcttttggttttgtatattttgtacattaataataaacagtggaaagagaagcagctcattt

SEQ ID NO: 487 - DNA, 1076 bp, Rattus norvegicus
cacacagcaaacatgacccagcagccgcctgacgttgaggaggatgactgtctttctgaataccaccacctcttctgtccggaccttctccaggacaaagtggcttttatcactggtggtggttctgggattggcttccggatcgccgagattttcatgaggcatggctgccacactgtcatcgtcagcaggagtctgccgagagtgtccgaggctgctaagaagttggttgctgccactggaaagcggtgtctccctctgtctatggatgtccgagttcccccagctgtcatggctgctgtggaccaagcgctgaaagaatttggcaaaatcgacatcctcattaactgtgctgcagggaactttttatgccctgccagtgcattgtctttcaatgcctttaagactgtggtggacattgacacccttggcaccttcaatgtgtctcgtgtgctttatgagaagttcttccgggaccatggaggagtgatcgtgaacattaccgccaccctcagtatgcgggggcaggtgctgcagctccatgcaggcgctgccaaggcggctgtggatgctatgacgcgacacttggctgtggagtggggtccccagaatatccgtgtcaacagcctggctcctggtgccatcagcggcactgagggtctgcggagattaggaggccccaaggccagttcgaaatttaagtatctttcaagtcctattccaagactcggaaccaagacagaaatcgcccacagcgtgctgtacctagccagccctctggcttcctatgtctcagggattgtgttggtggttgatggtggtagctggatgacgctcccaaatgacattgggcgactgctagagtttgaatcctcctctgctaagctgtagtgtttgaagagcacacccaaggcttcaagcatgttaaagcaacagaatcaactgaactacgtcctctaccccaagataccttttttgacacataaacattgattgccttaagaaagttgtactgaggaggccgtgttcttccatggggaggcttccctgtctcacatagtctatagtcacacgaa

SEQ ID NO: 488 - DNA, 1272 bp, Rattus norvegicus
gaattcgactgctggaaccaacgtcctctcttaccctccaccttcttctgccacctctaccacggtcaccatgtcgcaagcccggcctgccactgtgctgggtgccatggagatgggtcgccgcatggatgtgacctccagctccgcgtcggtgcgcgccttcctgcagcgcggccacacggagatagacaccgccttcgtgtatgcgaacggtcagtctgagaccatcctaggagacctggggctcggactgggccgcagcggctgcaaagtaaaaattgccaccaaggctgccccaatgtttgggaagacactgaagccagccgatgttcggttccagctggagacgtcactgaagaggctgcagtgtccccgggtggacctcttctatttacactttccagaccacggcactcctatagaggagaccctgcaggcctgccaccagctgcatcaggagggcaagtttgtggagcttggtctgtccaactatgtctcctgggaagtggctgagatttgtaccctctgcaagaaaaatggctggatcatgccaactgtgtaccagggcatgtacaacgccatcaccaggcaggtggagactgagctcttcccctgcctcagacacttcggactaaggttctacgccttcaaccctttggctgggggcctgctgactggcagatataaataccaggataaggatgggaagaatcctgagagccgcttctttgggaatccattttctcaactgtacatggaccgctactggaaggaggaacacttcaatggcatcgccttggtggagaaggctctgaagactacctatggccccactgcccccagtatgatctcagctgccgtacggtggatgtaccatcactcacagctcaagggcacccaaggggatgcagtcattctgggcatgtccagtctggaacaactggagcagaacttggccttggtcgaggaagggcctctggagccagctgttgtggatgcctttgaccaagcctggaacctagttgcccacgagtgtcccaactatttccgctaagatacatctgccttggggatggcgcagcttactgcctgccccgccttgtcctgggctcgatctgatctggttctttcctttttagacaggtcactgtctttttcttccctgctttctatacagccagttgctttcaaagtgagagctggctgagccccaatacctcctgctgaataaaactgttccctgtcacagcctgggctacaactggcggccga

SEQ ID NO: 489 - DNA, 5729 bp, Rattus norvegicus
agcctgcaggggtctcggggcgcacagggctgccgggattgtcctcgtgggtgtccgcagtccgagatcgccgcgtgtctgtcatctgtttccttcgtcctccgggccccggccgcgcgcatccgccgggtagtccggggtccgtgcggggggcggcggcgcctctccctcgggccgggcggcgggaatgcggttgccttggccggctgggcagcgggcgcggctgcaaacggaacccgggtgcactcgccgctggccgggacgccgccctggcctgctctcggctcccgaggccgccctgcgctctggggcccggcgcggaatgaggtgcaggccgcgcaccgccgacgccccctccgcggccccctggttcaacgcggccgcccgcgcctcgcgtgccccagcgcccacgttagagcctcgcactggcagcgctcgcggaggcacaggcctgcagagcgcacgccactcggcccgggtcccgatcgcggggactcgcctcttggacaccgccccaggtgcgggaccccgacacgctgcaagcgcgcgggccgcctccgcatcgcagagctcctctagcctggcccgtggctttggcctccacggagccggatctccctgcctccctccacatttctccgcatcctttcaacacccttcccgctgctctaccacctcccattcattgcatccatttctccttcccggctcggttcttcttcccataacctccccggccggaccccgctacccacccggtacattcatggaagtttagggcctggaccgtggctcggagtctggcctgagagcgcagcggagctgctggtagggcagaggaagatgtctgcgctcaagcggatgatgcgggtctccaatcgctccctgatcgccttcatcttcttcttctccctctccacgtcctgtctctatttcatctatgtggctccaggcatcgccaacacatacctctttatggtacaagctagaggcatcatgctgagagaaaatgtgaaaacaattggacacatgatcaggctgtataccaataaaaacactacgctcaatgggacagattatcccgaaggcaataatacaagtgactatcttgttcaaacaacaacgtatcttccgcagaacttcacgtattcaccgcacctcccctgtccagagaagctgccttatatgcggggattcctcagtgtcaacgtgagtgaaatcagctttgatgaagtccatcagctcttctccaaggactcggagattgagccgggaggccactggaggccccaggactgcaagcctagatggaaggtggcagttctcatccccttccgtaaccgccatgaacacctcccgatctttttcctgcacctgatcccgatgctccagaaacagaggctggaatttgccttttatgtcatcgaacagaccggcacacaaccgttcaatcgtgccatgctctttaacgtgggtttcaaagaggccatgaaggacagagcctgggactgtgtgatcttccacgacgtggatcatcttcctgagaacgatcggaactattacggatgcggggagatgccgcggcactttgcagcgaagctggacaagtacatgtacattcttccttataaggagttctttggtggggtgagtggcctgacagtggagcaatttaggaagatcaatggctttcccaatgccttctggggatggggaggagaggatgacgacctttggaacagagttcactactctggatacaatgtaacccggccagagggggacttgggaaaatatacatctattccccatcaccatcgaggggaagtacaatttttaggacggtataaattacttcgctattctaaggagcgtcagttcattgatggattgaacaatttattatacacacccaaaatactggttgacaggctgtatacaaatatatctgtaaacctcatgccggagttagctccagttgaagactattaaaaagaagtcattcccgtggtggggtagaccacagcactgaatcatgaacttggcttggaatgcactcaccgtggaagttagagattggtgtgtatctcagtgtcccagtctgtaaaaagaaccagcagtccttaatgtttacagcgtgggctccatctgtcacactccccactctcctccctgctgggagcacctcccatggcgagcactgtcgagatacaaacccattgcttgggattggaagtgaagaaaactccctacacagagaagattttttttatactgaaatctataatttaattcaagagaatgcttttatttccgttcaaacatattttgtacatatgtgatgtaaattaaatatgttcaaattgttggaaaataagatgtcataattttgcatgtaattggttatgccttcattggacttttatagacattttttttatttgcatggggggaaaaaactgtaaatttatgtcgccagacaaaggttaagccttgtgtgaaatgaagggactgtcagcgacggacaaagataataccgtaactgtttcgttgaactggtgttcagctttagccttcagcctcatgggaagaggcacagtcctctgagggctttgaaggaaggaaggaaggactcgaatagcttttcttcctgccaggattacctgttttgtttgtttgtttttttcacttgcttgcagtctcatcagatcttgccaagtcagcagccatattgtttatgcatactgcatgagtattaccaagaaaatcttcagagttgtaaagtgacatgctgtacaggacctcttcgtgttaaatgtctctatgtacctctgctgtgtcagggatcttgtgcctcaaaaaaaaaatgtccccaaggttgtgtttatacacggtctatatttttttcaatctcataatgaacagcattattatttccactttagaagaaccaaaagaaggtatcttcttttaaaaacattttttttaaagaatgaatttatggaaaatccagtagtgcttatacagatgaattatactattagatgagaaattagatgctctatttttatgaagataaatgcttagattaaaacagactttaactttaattctcaaacgtacatagttccctttcacatcagccagtcacttgaactgttttttttttctttttttccgctttcaagaaatctctggtgttattcaaatttttttttcactaccagtataatttaatgcccccccccccccccgtccccagtggagctgggaattgaatctagggcctgtagacttaccttaaaatcattattgtatgtgtggatgctgtgacttctgaactaggtctcacagcctaacgccaggtctgctcatcctcctcacttgggtgaggcttttgacaaccaaagaacaacaaagcccaaacagtgttctgaaaattatcaattctaaagattcttgaaaaatagcttgtattctcatgtaagatcttatctcccatatttaaacaaattgaaaacatcgcctatctgtcaagtgaaccctcccaaagagcaaagagtgagagaattctgaatgtggggaagtttgtccccttgtctgacgtgagagcttagcttgcagttgtccttgtctgtcacagttttaatgctgatggccacaagccaaagtaattagatccttacaccggagaagacagacaccctatctgttgtgacagcagtctttccaggttcttcttagacgtgcttctaaaatacttacctcccaacttttttggttactcaaagtagtggggggggggggaatcacaacctgtggaaatgaagatttttgtatgctatcagttattctctgtctcttgtggctaatgaggtgtttaattcgacggaatgacagtaaagtgtaatgttaatgttaaggctggtgagacaggactctgggtgtgtggtgagcccagccctggtccctcctcctggttctgtggaatgtggtaccacgtggattcttactgggggaaacacactttataaggtgacaggctatccacagtcagcaccttttgcattgatatatagttcacagctttaggaaaattcagaactggtgaactgccttactctcttagggtaagtctggcattaacatggctgcgggagtcggatgtatttctgctaaatcttcatgctgaatctgctgtgtcagcttgtgagaaccgccttttctaattcagacctggaattattttctttttctttttctttttttttttttttttttttggagctgaggactgaacccagggccttgagcttgctaggcaagagctctaccactgagctaaatcctcaaccccctggaattattttcagtagtgaatagtgatctctatatgtcaccacaaatgacagttttgccctgttaccataaccacagtgaatctcctccttctatattagcccaagcagacagtctgatagaatcaaatgcacttggtggctttgcactgtctgcccacatccgctgccttgccaacggtggtatttaaacgtggtttttgtttgcttttgcctgaacaagtcaaatcgagacagttgaaacttacctgagattaggaagaatgtcctctggtaacttacctgtcacttgtcttagactcggagccagtgtggccacagatgctgggaggccctcgtggcactggggaaatgatcgatgcctttgaactgaagaaagaaagcatgactgacaggccgaaagttcccacgtccactgtaacattctgtctgattttttaatgaagatgtcatttaattatttgccaaaactagggttttaatgaagtggcttccccagtcccctttttatagttattttctggtgtagacccttgaggtggctcagggtataaaggtgcctctcccaagcctgacaacctacgcttgatccctggggttcacactgtagaaggagaggactaccctggtacattgttctcagacttctgtatgtgtgcggctcgcgctcacacacacacacacacacacacacacacgcgcgcgcgcaaggcaaattaaaaggtatataaaagttaaatttctgttttataaaacggtgtttaataagaaaatatttataaaatttaagtacaaaattatctattaaaaattcctattcctgccagtcaatggtggagtttgcctttaatccaagctctctggaagcaaggcaggttctctgaattggaggccagcctggcctgtggagtgagttccaagacagctggggcgacacagagaaactgtctcaaaaacaaaaccaaatcaaaacaaaaactgctattccagttgatactgataaccattgtaaaagagagcagaaatatcatcaatacaatatcgtccctttgggactccctgggggggaagcagattgtatttgtgtcattgtatctgccctgtttctttataaataacactctagatttcttgccttgggtttgcagagttgttgagaagcaaactgtcgccgtgttttttggaaggtggaagtgtacttaagattatttattatgaaatggagtacttctatgtaagtgcgttgatgtaaacgctagtgatttctcgctttttttttttgtcttgttttgcttctcatggaaatgtttgtactttttttatcattgtcttttatgaaatacaatgttctaaagaaaaaaaaaaaaaaaa

SEQ ID NO: 490 - DNA, 6556 bp, Rattus norvegicus
  misc_feature (1)..(6556): n = a or c or g or t
ccaagatggcgcccaccgcagtcccgcccgccgcagcctcggcgcctctgcagtccggccgcgcctcccgggccccgcgctagggccgctgccgcctcgcccgccgccgccgccgccagctgacctgtcccggacacataactaacgaagctgctgcaggatgagaagatggcagcgcggctgctcgcaccaccaggccctgatagtttcaagcctttcacccctgagtcgctggcaaacatcgagaggcgtattgccgagagcaagctcaagaaaccaccaaaggcggatggcagccaccgggaggacgatgaagacagcaagcccaagccaaacagtgacctggaggctgggaagagtttgcctttcatctacggggacatcccgcaaggcctggttgcggttcccctggaggactttgacccttactatttgacgcagaaaacctttgtagtattaaacagagggaaaactctcttcagatttagtgccacacctgccttgtacattttaagcccttttaacctgataagaagaatagctattaaaattttgatacactcagttttcagcatgatcatcatgtgcaccatcctgaccaactgtgtgttcatgacctttagtaaccctccagaatggtccaagaatgtggagtacacattcacagggatttacacatttgaatcactagtgaaaatcatcgcaagaggtttctgcatagacggcttcaccttcttgcgagacccgtggaactggttagacttcagtgtcatcatgatggcatatgtgacagagtttgtggacctgggcaatgtctcagcgctgagaacattcagggttctccgagctttgaaaactatctctgtaattccaggcctgaagacaatcgtgggcgccctaatccagtccgtgaagaagctgtcggacgtgatgatcctgacagtgttctgcctgagtgttttcgccctgattggcctgcagctcttcatggggaaccttcgaaacaagtgtgtcgtgtggcccataaacttcaacgagagctacctggagaacggcaccagaggctttgactgggaggaatatatcaacaataaaacaaacttttacatggttcctggcatgctagaacccttgctctgcgggaacagttctgatgctgggcaatgcccagagggattccagtgcatgaaagcaggaaggaaccccaactacggttacaccagctttgacaccttcagctgggccttcttggcattattccgccttatgacccaggactattgggagaacttataccagctgaccttacgagccgctgggaaaacgtacatgatcttctttgtcttggtcatcttcgtgggttctttctatctggtgaacttgatcttggctgtggtggccatggcttatgaggaacagaaccaggcaacactggaggaggcagagcaaaaagaggccgagttcaaggcaatgctggagcaactcaagaagcagcaggaggaggcacaggctgctgcaatggccacctcagcgggcactgtctcggaagacgccattgaagaagaaggggaagatggggtaggctctccgaggagctcttctgaactgtctaaactcagttccaagagcgcgaaggagcggcggaaccgacggaagaagaggaagcagaaggagctctctgaaggcgaggagaaaggggacccggagaaggtgtttaagtcagagtcggaagacggtatgagaaggaaggccttccggctgccagacaacaggatagggaggaagttttccatcatgaatcagtcgctgctcagcattccaggctcgcccttcctctcccgacataacagcaaaagcagcatcttcagcttccggggacccggtcggttccgggaccccggctctgagaatgagttcgcagacgatgaacacagcaccgtggaggagagcgagggccggcgtgactcgctcttcatcccgatccgcgcccgcgagcgccgcagcagctacagtggctacagcggctacagccagtgcagccgctcgtcgcgcatcttccccagcctgcggcgcagcgtgaagcgcaacagcacggtggactgcaacggcgtagtgtcactcatcgggcccggctcacacatcgggcggctcctgcctgaggcaacgactgaggtggaaattaagaagaaaggccctggatctcttttagtttctatggaccaactcgcctcctacggacggaaggacagaatcaacagcataatgagcgtggtcacaaacacgctagtggaagagctggaagagtctcagagaaagtgcccaccgtgctggtataagtttgccaacactttcctcatctgggagtgtcacccctactggataaaactgaaggagatcgtgaacttaatcgtcatggacccttttgtagacttagccatcaccatctgcatcgttctgaatacgctatttatggcaatggagcaccatcccatgacaccacagttcgaacacgtcttggccgtaggaaatctggtgttcaccgggatcttcacggcggaaatgtttctgaagctcatagccatggacccctactattatttccaagaaggctggaacatttttgacggatttattgtctccctcagtttaatggagctgagtctcgcagatgtggaggggctctcagtgctgcggtctttccgactgctccgagtcttcaagctggccaagtcctggcccaccctgaacatgctgatcaagatcatcgggaactccgtgggtgccctgggcaacctgaccctggtgctggccatcatcgtcttcatcttcgccgtggtggggatgcagctgtttggaaagagttacaaggagtgcgtctgtaagatcaaccaggagtgcaagctcccgcgctggcacatgaacgacttcttccactccttcctcatcgtcttccgagtgctgtgtggggagtggatcgagaccatgtgggactgcatggaggtggccggccaggccatgtgcctcattgtcttcatgatggttatggtcattggcaacctggtggtgctgaatctattcctggccttgcttctgagctccttcagcgcagacaacctggcggccacagacgacgacggggaaatgaacaacctgcagatctcagtgatccggatcaagaagggcgtggcctggaccaaagtgaaggtgcacgccttcatgcaggctcacttcaagcagcgggaggcggatgaagtgaaacccctcgacgagctgtatgagaagaaggccaactgcatcgccaaccacacgggcgtggatatccaccggaacggcgacttccagaagaacgggaacggaaccaccagcggcatcggcagcagcgtggagaagtacatcatcgacgaggaccacatgtccttcattaacaacccaaacctgaccgtccgggtgcccattgctgtgggcgagtctgacttcgagaacctcaacacagaggatgttagcagcgaatcagaccctgaaggcagcaaagataaactggacgataccagctcctcagaaggaagtaccatcgacatcaagcctgaggtggaagaagttcccgtggagcaacctgaggaatacttggatccggacgcctgctttacagagggttgcgtccagcggttcaagtgctgccaggtcaacatcgaggaaggactaggcaagtcgtggtggatcttgcggaaaacctgcttcctcattgtggagcacaattggtttgagaccttcatcatcttcatgattctgctcagcagtggcgccctggcctttgaggacatctacattgagcagaggaagaccatccgcaccatcctggagtatgcggacaaggtcttcacctacatcttcatcctggagatgttgctcaagtggacagcctacggcttcgtcaagttcttcaccaatgcctggtgctggttggacttcctcattgtggctgtctctttagtcagccttatagctaatgccctgggctactcggaactaggtgccataaagtcccttaggaccctaagagctttgagacccttaagagccttatcacgatttgaagggatgagggtggtggtgaatgccttggtgggcgccatcccctccatcatgaatgtgctgctggtgtgtctcatcttctggctgattttcagcatcatgggagttaacctgtttgcggggaaataccactactgctttaatgagacttctgaaatccggttcgaaatcgatattgtcaacaataaaacggactgtgagaagctcatggagggcaacagcacggagatccgatggaagaatgtcaagatcaactttgacaatgtcggagcagggtacctggcccttcttcaagtggcaaccttcaaaggctggatggacatcatgtatgcggctgtagattcccgaaagccagacgagcagcctgactacgagggcaacatctacatgtacatctacttcgtcatcttcatcatcttcggctccttcttcaccctcaacctgttcatcggtgtcatcatcgacaacttcaaccagcagaagaaaaagtttggaggtcaggacatcttcatgacagaggaacagaagaagtactacaatgccatgaaaaagctgggctccaagaagccacagaagcccatcccccgacccttgaacaaaatccaagggattgtctttgatttcgtcactcaacaagcctttgacattgtgatcatgatgctcatctgccttaacatggtgacaatgatggtggagacagacactcagagcaagcagatggagaacattctttactggattaatctggtctttgtcatcttcttcacctgcgagtgtgtgctcaaaatgtttgccttgagacactactatttcaccattggctggaacatctttgactttgtggtggtcatcctctccattgtgggaatgttcctggctgatatcattgagaagtacttcgtctccccaaccctattccgagttatccgattggcccgtattgggcgcatcttgcgtctgatcaagggcgccaaagggatccgcaccctgctctttgccttaatgatgtcgctgcccgccctgttcaacatcggcctcctgctcttcctcgtcatgttcatcttctccatttttggcatgtccaacttcgcatacgtgaagcacgaggccggcattgacgacatgttcaacttcgagacatttggcaacagcatgatctgtttgttccagatcacaacgtctgctggctgggatggcctgctgctgccaatcctgaaccgcccccctgactgcagcttggacaaagagcacccagggagtggcttcaaaggggactgtgggaacccctcggtgggcatcttcttctttgtgagctacatcatcatctccttcctgattgtggtgaacatgtacatcgccatcatcctggagaacttcagcgtggccaccgaggagagcgccgaccctctgagtgaggatgacttcgagactttctatgagatctgggagaagtttgacccagacgccacccagttcatcgagtactgtaagctggcagactttgccgacgccctggagcacccgctccgagtacccaagcccaacaccatcgagctcatcgccatggacctgcccatggtgagcggagatcgcatccactgcttggacatccttttcgccttcaccaagcgagtcctgggagacagtggggagttggacatcctgcggcagcagatggaggagcggttcgtggcatccaatccttccaaagtgtcttacgagcctatcacaaccactctgcggcgcaagcaggaggaggtgtctgcagtggtcctgcagcgtgcctacaggggacacttggctaggcggggcttcatctgcagaaagatggcctccaacaagctggagaatggaggcacacacagagacaagaaggagagcaccccgtccacagcctccctcccctcttacgacagcgtcacaaagccagacaaggagaagcagcagcgtgcggaggagggcagaagggaaagagccaagaggcaaaaagaggtcagggagtccaagtgctagaggaggggaaaggaagcttaccccggctgaacactggcaagtgaaagcttgtttacaaacttccgaatctcacggatgcagagcagctgtgcagacgctcgctgtactggaagacctataccaaacatagtctgcttacatgtgacatggtggcatcctgagcggtgactgctggggacaaaggaccctgctccctggactcacagatctcctatcgcttgggcagacggttactgcatgttccacacttagtcaatgcaacttaggactaaactaaccaggatacaaaaccgaggcggctgccgggaccagcagatcaccgctgcagccaaatggattttattttttcattttgttgattctcagaagcagaaagcatcactttaaaagtttgtttgttcatncaaacaatatttgaattcttacattagttaagctaagcancaaaaag

SEQ ID NO: 491 - DNA, 1028 bp, Rattus norvegicus
gcggccgcgtcgacgttgcacggagagtactgcctgtctctcggcgtgtgcatctgtcctgctctcaaccgcagcctgcgccctaccttctgcagctccagcctactcctgaccgacagcatcatggctctcagaggcaccgtgactgacttctctggattcgacggcagggctgatgccgaagttcttcggaaggccatgaaaggcttgggcaccgacgaggacagcatcctgaacctgttgacagcccggagcaacgctcagcgccagcagattgctgaggagtttaagactctgtttggcagggaccttgtgaatgacatgaagtctgaactgaccggaaagtttgagaagttaattgtggctttgatgaagccctcccggctctacgacgcctacgagctgaaacacgctcttaagggagctgggacagatgagaaagtgttgactgaaatcattgcctcaaggacacctgaagagctcagggccataaaacaagcttatgaagaagaatatggttccaacctggaagatgatgtggtgggggatacctcagggtactaccagaggatgttggtggtcctccttcaggccaatagagaccctgacactgcaattgatgatgctcaagttgaactggatgctcaggcattgttccaggctggagagctgaagtgggggacggatgaagaaaagttcatcaccatccttgggacacgcagtgtgtctcatttaagaagagtgtttgacaagtacatgacaatatcaggatttcagattgaggaaaccattgaccgagagacctcagggaacttggagaacttactcctggctgtcgtgaagtctattcggagcatacctgcctaccttgcagagaccctctactatgctatgaagggtgctgggacggacgatcacaccctcatcagagtcatagtgtcgaggagtgagattgatctgtttaacatcaggaaggagtttaggaagaacttcgccacgtccctgtactctatgatcaagggcgacac

SEQ ID NO: 492 - DNA, 797 bp, Rattus norvegicus
cagcagggcactgggtacccagcactgagcagatcaattcctggagctgagaatggcctgcaagcatctgcccttcctggctttggcgggggtactgctggcttacctctgcagccagtcagaagcagcaagcaactttgactgctgcctcacgtacacaaagaacgtgtatcatcatgcgagaaattttgtgggtttcacaacacagatggccgacgaagcttgtgacattaatgctatcatctttcacctgaagtcgaaaagatccgtgtgcgctgacccaaagcagatctgggtgaaaaggattttgcacctcctcagcctaagaaccaagaagatgtaaaaacggatgcttttctgggatggaattggacacagcccaaggaggaaatgatcacagctggggttggaggtttcacctgcacatcactgcacagacctgatttgtgtcccagtggtcttgtccaatggatgaagttgattcatattgcatcatagtgtgtcatatttaagctcatattagagttaagttgtattttgtgttatttatagatccgaattttctatgtttagctatttaatgttaatttcccacaatctatgaggggcgcttagtagaaggttcaatattatgtttaaggcagtaagtttatatggcccttcttggaaacaataagctattgtaaaaatatttaatgttcttctgtgtgcttaattgtttcttaaattgatacgatttacttataaaacagaaaggaattataagaatatattgaaaataaaagaactgaaaggca

SEQ ID NO: 493 - DNA, 1416 bp, Rattus norvegicus
atgtggaaagcctctgcaggccatgctgtgtccatcacccaggatgatggggaagccgatgactgggagactgaccctgattttgtgaacgatgtgagtgaaaaggaacagagatggggcgccaaaaccgtgcagggatcggggcaccaggaacacatcaacatacacaagcttcgagagaatgtcttccaagaacaccagacactcaaggagaatgagctggaaacgggacccaaggcttcccatggctatggcgggaagtttggtgtggagcaagataggatggacaaatcagctgtgggccatgagtaccagtcaaagctctccaagcactgctcacaagtggactcagtccggggcttcggaggcaagttcggtgtccagatggacagggtggatcagtctgctgtaggctttgaataccaggggaagacggagaagcacgcctcccagaaagactactccagtggtttcggtggcaaatatggagtgcaagctgaccgtgtagacaagagtgctgtggggtttgactaccagggcaagacggagaagcacgagtcacagaaagattactccaaaggttttggtggcaaatacggaattgacaaggacaaggtggataaaagcgctgtgggctttgagtatcaaggcaaaacagagaagcatgagtcccagaaagactatgtaaaaggctttggaggaaagtttggtgtgcagaaggatcggatggacaagaacgcatccacctttgaagaagtggtccaggtgccgtctgcctatcagaagactgtccccattgaggctgtgaccagcaaaaccagtaatattcgtgctaactttgaaagcctggcaaaggagagagagcaggaggacagacggaaggcagaagccgagagagctcagcggatggcccaagaaaggcaggagcaggaggctcgaaggaagctggaagagcaagccagagccaagaagcagacaccccctgcatcccctagtcctcagccagctgaagacagaccaccatccagccccatctatgaggatacagctccgttgaaggccgagcccagctacggaagtagtgagcctgagcctgagtacagcactgaggctgcaggccttcctgaggccagcaaccagcaaggtctggcctacacatcagagcctgtttacgagaccacagaggttcctggccactaccaagcagaggatgacacctacgatgggtatgagagtgacctgggcatcacagccatcgccctgtatgactaccaggctgctggcgatgatgaaatctcctttgaccctgatgatgtcatcaccaacatagaaatgattgacgatggctggtggcgtggggtgtgcaaaggcagatatgggctcttcccggccaactatgtggagctgcggcagtag

SEQ ID NO: 494 - DNA, 309 bp, Rattus norvegicus
atggcagggaaagaattggagcgatgccagcggcaggcagaccaagtgacggaaatcatgctcaacaatttcgacaaggtcctggaacgcgatgggaagctgtcagagttgcagcagcgctcagaccagctcctggacatgagttctgccttcagcaagacaaccaagactttagcccagcagaagcgctgggagaatatccggtgccgggtctacctggggctagccgtggctggcggccttctcctcatcctggttgtgcttctggtcatctttcttccgagtggagaggacagtagtaaaccatag

SEQ ID NO: 495 - DNA, 1733 bp, Rattus norvegicus
ccacgcgtccgagctcctacctgagcagaggtattctggcagcaatggcatcgtcggacactgaaggaaaaagagtggttgttatcggtggtggtttggttggagcattgaacgcgtgctttctcgcaaagaggaatttccaagttgatgtgtacgaagctagggaagatattcgagtggctaactttatgcgtggaagaagcattaatttggccctttcttatagaggacggcaggccttgaaggccgttggtctggaagatcagatcgtgtccaaaggtgtgcccatgaaagccagaatgatccactctctctcgggaaagaagtctgcaattccctatgggaacaagtcacagtatatcctttcaataagcagagaaaagttaaacaaggatctgctgactgccgtggagtcctaccccaatgcaaaggtgcactttggccacaagctgtcaaaatgctgtccggaggaagggatactcacgatgcttggacccaacaaagttcccagagacatcacgtgtgacctcattgtaggatgtgatggggcctactcaactgtcagagctcacctcatgaagaagccccgttttgattacagtcagcaatatatccctcatggctatatggagctgacaattccacctaagaacggggagtatgccatggaacctaactgtcttcacatttggcctagaaatgcctttatgatgatcgccctaccgaacatggacaaatctttcacatgcaccttgttcatgtcctttgaggagtttgaaaagcttccaacgcatagtgatgtgctggacttcttccagaagaactttccagatgccatccctctgatgggcgagcaagccctcatgagagatttctttctgttgcctgcccagcccatgatatcagtaaagtgctctcccttccacctgaagtcacgctgtgtgctgatgggagatgcagctcatgccatcgtcccattttttgggcaaggaatgaatgcgggctttgaagactgcttggtatttgatgagttaatggacaaattcaataatgatcttagtgtgtgccttcctgaattctcaagatttaggattcctgatgaccatgcaatttcagacctgtctatgtacaattacatagagatgcgagcgcatgtcaactctaggtggttcctgtttcaaaggctcctggataaatttcttcatgcactaatgccatccactttcatccctctctataccatggtcgccttcaccagaataagataccacgaggcagtgctgcgctggcattggcaaaaaaaggtgataaacagaggactctttgtccttgggtccctggtagccattggaagtgcctacatactcgtgcaccacctgtccccgagacctctggaactcctgagatctgcctggacgggaacctctggccactggaataggagtgcagacatttctccacgagttccatggagtcactaggacaaatgccccagttcactatccatagtgtcaacgttccgggtagcaaatgcttgattcctcttcaatatcaagggagaaactcatgttcccattgccgtcttcagttcactatgggaaaatcattgtcagcatataattaagttcggagtggagggctgtttttacagtgtctcattattttgcatgcttggactgggttcaatttttaaatttaaaaacacaataaccaaaaaaaaaaaaaaaaaaaaa

SEQ ID NO: 496 - DNA, 435 bp, Rattus norvegicus
accaccagcacaactctgagatatgggctcctgatcctcatgaaatacccagaaattgaagagaaacttcatgaagaaattgacagggttattgggccaagccgcgtccctgctgtcagagacagactggatatgccctacatggatgctgtggtgcatgagatccagagattcatcaatcttgtcccttccaacctaccccatgaagcaaccagagatactgtgttccaaggatatgtcatccccaagggtacagttgtgattccaactctggactccctcttatatgacagccatgagtttccagatccagagaagtttaaacctgagcatttcctgaatgaaaatgggaagttcaagtacagtgactatttcaaggcattttctgcaggaaagcgtgtgtgtgttggagaaggcctggcccgcatggaattg

SEQ ID NO: 497 - DNA, 2438 bp, Rattus norvegicus
cttttccgtgcctcctggacgaggctgctctggcagcctcagcccggacaggttggtccacaccatggccacctgctggccggcactatgggcttatcgcttctacctgattgtgctctgtctgcccattttcctgttgcctctgccactcattgtccaaactaaggaagcctactgtgcttactccatcatcctcatggcactgctgtggtgtaccgaggccctgcccttggctgtcactgccctcttccccatcgtcctcttccccttgatgggcatcatggatgcctctgaggtctgcatagagtacttcaaggacaccaacatattgtttgtcggggggctgatggtggccattgctgtagaacactggaacctgcacaaacgcattgccctccaagtgcttcttatcatcggagtgcggcctgccctgctgcttctgggcttcatgttggtcacagccttcctctccatgtggattagcaacacagccaccacagccatgatggtacccatcgggcatgcagtcctggaacagctgcagggctccaaaaaggacgtggagggaggcaataataaccccacctttgagctccaggaagaatgtccccagaaggaggtgaccaagcttgataatggacaacctgtatctgctccttcagagccaagaacacagaagacccaagagcatcaccgcttcagccagggcctgagtctctgcatctgctactcagccagcatcgggggcattgccaccctgacgggtaccacgcccaacctggtgctccaaggccaggtcaactcgctcttcccccaaaatggcaatgtggtgaactttgcttcgtggtttggtttcgccttccccaccatgatcatcttgctgctgctggcttggctatggctacaggtcctcttcctgggtgtcaacttccggaagaactttggctttggggaaggggaagaggaacgaaagcaggctgctttccaggtcatcaagacccagtacaggctgctggggcccatgagttttgcagagaagactgtcactgttctgtttgtcctgctggtggtgctctggttcacgagagagccgggcttcttcccaggctggggtgacacagttttcgccaatgaaaaagggcaaagcatggcgtcagatgggacagtggccatcttcatcagcctggttatgttcatcataccctccaagatcccaggactaatgcaggaccccaaaaaaccagggaagctgaaggctcctcctgccatcctcacctggaagacagtgaacgataagatgccctggaatatcgtgatcttgctgggtgggggctttgccctggccaaaggcagtgagcaatcaggtctgtctgaatggctgggagacaaactgaccccactgcagcacataccgccatcagccactgcagtcatcctctgccttttgatcgccatcttcactgagtgtaccagtaacgtggccaccactacgctatttctacccatcctggcctccatggcacaagccatctgtcttcacccgctctacgtcatgctcccctgcaccctggctgcctccctggctttcatgctacctgtggccactccacccaacgccattgtattctcctttggaggcctcaaggtgtctgatatggcccgcgctggattcctgctcaatatcatcggagtgctggctatcacattatccatcaacagctggagtatccccatcttcaagctggacacattcccctcctgggcccactccaacacaagccagtgccttctcaatccgtctaattccactgtaccaggaggcctctagactacctacaacccagctctgctcaggaaaacccgccggtgccactccttagagccaggagagggcgccccaaacgccaagtcccgggccagagatggagaataggccggcgcacgcgcaatcgtgtactcgtgtgtctgcctagatcctgtgtgctctctctccagtgaagaggaagatgctcacgcctccgtgtggagtgcgtggacgcttgtgtgtggtatggcatgaggacttctcagtagttgtatgcatggtaacagcacctgcactctggctcccagctaggcctccagatctctttgcactgtatttattaaaactctgggcaggaggcccctgggagcaggaactccaaggtgcattaaaggctgttcattttcagtagaatccgggtgtttcccggtgttcagggcctggaagcagaggtcgcgcacccctgccagaccgtttggagtgggcgcagccacccagcaaagttgcagtgacttcaccagcggctaattgggagttgccagtccctgcgtgcctttgggaaaaccggcctccccgttcccagagcactccctggacatttacataaaaccctctgcccctgccaaaaaaaaaa

SEQ ID NO: 498 - DNA, 2426 bp, Rattus norvegicus
catcagtgctgttctctctactggtgcttcgggaactctagaactccttcctgagagggaagcaaaccaagctattgccagagagagttccataagagctctgaatatgcattggctgtggaaaattccaagactttgcaccttctggggcactgagatgttccaccgttctttccatatgaatatcaagaaactaatgcccatacagtggggccaccaagaagtccctgccaagttcaacttcgctagtgatgtgatagatcactgggccagcctggagaaggctggcaagagatctccaggtccagccctatggtggatgaatggcagtggggaagaactaaagtggaacttcagagaactgagtgaaatcagtaaacagacggccaatgttctcaccggggcctgtggcctgcagcgtggggaccgtgtagcagtagtgcttcctcgagtcccagagtggtggctggtgaccctcggctgcatgcgttctggtcttgttttcatgcctggaaccacccagatgaaatccacagacatactctacaggctgcaatcatccaaggccagggccattgtggctggggatgaagtggttcaggaagtggatgctgtggcccctgactgctcttttctgaaaatcaagttgctggtgtctgaaaaaaatcgagaaggatggctaaacttcaaggcactgctaaaggatgcatcccccattcatcagtgtgtggagactgtaagccaagaatcagctgccatctatttcactagcgggaccagtggccctcccaagatggcagagcactcccactgcagcctgggcctcaaggccaagatggatgctggctggacaggactgggaccttctgacacaatgtggaccatctcagacacaggctggatattaaacattttagggtcatttctggaaccttgggtattgggaacgtgcatatttgtccatcttttgccaaagtttgatccacaaactgttctaaaggtgctttccagctaccccatcaataccctgctgggtgcccccctcatttaccggatgttgctacaacaggatctttccagttacaagttcccacatctgcatagctgcttcagtggaggagagaccctcctcccggagactctggagagttggaaagccaagacaggactggaaatccgagaaatctatggccagacagaaacgggaattacctgcagagtttctaggacaatgaaagtcaaaccaggctacctgggaacagccattgtcccttatgatgtccaggtcatagatgagcagggcaatgtcctgccccctggcaaggaaggagacatggctctcagggtgaagcccatcaggcctataggcatgttctctggatatgtggacaatcccaagaagacacaggctaatattcgaggagacttttggcttctgggagaccggggaattaaggatacagaagggtatttccacttcatgggacggacagacgatatcattaattccagtgggtaccgaattggaccttccgaggtggagaatgcactgatggaacatcctgccgtggttgaaacagctgtgatcagcagcccagaccctatcagaagagaggtggtgaaggcatttgtggttctagcccctgagttcctgtcccatgaccaagaccagctcaccaaggttcttcaggaacacgtgaagtcagtgacagcaccctacaagtaccccaggaaggtggagtttgtcttagacctgcccaagaccatcacaggaaaaattgagcgagctaaacttcgagccaaggaatggaaaacatcaggataagcccaggcccagtgagactcccaaggctcttgctctgtctttcccaatccttttcttatgactccttagtcttcctatagcaatatgaaattattcatgtagaggcatgtatgtgatttaggtctttgcttggttattgacacagaacaatgacacgtttcatgctaaaagaagaaagaaagagggaataagaggtttgaagtcagaaaaggctaaaacagcaagggaaagaaattgccaattcaagtggtcaggaaggggtagagagaaggggaaagcagaatgaggagagagagagatgagaaggaactggagagaaatagaaaaagggttgtgtagaaggacactagtgtcttcgccaagttgtgtcaatccttagggacatcatgcccaaaggagaaggaaataccacttacagagcatgcccaaggcactgttatacacttgtcatgagtcctatacaggtcatgagccatcttacttcatctgggtgacatctgcaggctcatcttctgcaccccaaaatgtaccacttcctgtagctcacattttttgttctagctttatttccttgaattaataataaaatcacttcaaaatc

SEQ ID NO: 499 - DNA, 1607 bp, Rattus norvegicus
  misc_feature (1)..(1607): n = a or c or g or t
catgctgaaatatcgcggtttaccatatggggatggtggcgacaatctcctggagcccgtcagatcgcggaaattaccgatgcctgcgcagctccttccgctcagctccgcgtccgagcctcctggaacgatatttggagttcttaaaagatggcagacattgacaacaaagaacagtctgaacttgatcaagatttggaagatgttgaagaagtagaagaagaagaaacgggtgaagaaacaaaaatcaaagcacgtcagctaactgttcagatgatgcaaaatcctcagattcttgcagctcttcaggaaagacttgatggtctggtagacacaccaacaggatacattgaaagcttgcctaaggtagtcaaaagacgggtgaatgctctcaagaatcttcaagttaaatgtgcacagatagaagccaaattctatgaggaagttcatgaccttgagagaaagtatgctgttctctatcagcctctgtttgataagcgatttgagatcattaatgcaatttatgaacctacagaagaagaatgtgaatggaaaccagatgaggaagatgaagtttcggaggagctgaaagaaaaggccaagattgaagatgagaaaaaggatgaagaaaaagaagaccctaaaggaattcctgagttttggttgacagtttttaagaatgatttgctcagtgatatggttcaggaacatgacgaacctattctgaagcacttgaaagatattaaagtgaagttttcggacgctggccagcctatgagttttatcttagaatttcactttgaacccaacgaatatttcacaaatgaagtgttaacaaagacttacaggatgaggtcagaaccagatgattctgatcccttttcttttgatggaccagaaattatgggttgtacagggtgccagatagattggaaaaaaggaaagaatgttactttgaaaaccattaagaagaagcagaaacacaagggccgtgggacagttcgtactgtgactaaaacagtttccaagacttctttctttaacttttttgctcctcctgaagttcctgagaatggagatctggatgacgatgntgaggcaatactggctgcagactttgaaattggtcactttttacgtgagcgtataatcccaagatcagtgttatacttcactggagaagctattgaggacgatgacgatgactatgatgaagaaggtgaagaagctgatgaggaaggggaagaagaaggagatgaggaaaacgatccagactatgacccaaagaaggatcaaaacccagccgagtgcaagcagcagtgagcagtgactggccttgaggacggcctccctgtaatagcctaaacatgactcacttacttacagccttatggttttgtattttcttgatagaatcagtaagtttctaagggaaaggaaattgatattttgcagaccaatttgttctaaccagcatcccaactctagctctgtagccacgttaccgagtccagccctttactgcatgctcaggtcgctgcagtctggttctcctgagagatttcatcatgtagctattggtacattatgaaaccactgtgaacaat

SEQ ID NO: 500 - DNA, 1750 bp, Rattus norvegicus
tggtgaggagaggacgaggatactagaatgtcaagtactgcgtcctaccggatcttcaattttgcaaggaatcgtattgctgtattacgagggggtagacgcttgtactccagggcagccacgagtaggaatcaagtgaaatggaggctcttttctcccgcatcattggccgtgaacgacagttctccacatggtggctttgctctgcggaaagcttacagacacacatcaaccgaggaagaggatttccacttgcagctcagccccgaacaggtcagtgacctgctccgagctggcgagtcatcccacaaggttctggatttcaacagcggagttccaaattcagtgttaaggtttgagagcaaccagttggcggccaattccccagtggaagaccgacaaggtgtggcttcctgcgtgcagacgagggggacggtgtttggtatttttgatgggcatggtggccatgcgtgtgcacaggcggtgagcgagaggcttttctattacatggcggtgtccctcatgtcccataagaccttggagcagatggaggaagccatggagaacatgaagcctttgctgcccatcctgcagtggctcaagcaccccggagacagtatttataaagatatcacatcggttcatctggaccacctccgagtctattggcaggaactccttgacctacatatggaaacgggactaagcactgaagaggcattgatgtactccttccagagactggactccgacatctcgctagaaattcaggctcctctggaagatgaggtaacgaagaacttatccctccaggttgctttttctggggcgacagcctgcatggcccacgtcgacggagttcacctgcacatagcaaatgctggcgactgccgagctatcctgggtgtccagggagacaatggagcgtggtcatgtttacctcttacctgtgaccacaatgcctggaatgaggcagagctgtcccggcttaagagagaacaccccgagtctgaggacaggacactcatcatagatgacaggctgctgggtgtcctcctaccctgcagggccttcggggacgtccagctaaaatggagtaaagagttgcagcggaacgtcctagagaggggatttgataccgaggccctcaacatctaccagtttaccccgccccactaccacactccaccctacctgactgctaagcctgaggtcacataccacaggcttaggccccaagataagttcctcgtgctggcctcagatggcctctgggacatgctggacaatgaggatgtggtaaggctggtggtggggcacctgtccaaggtcggtcaccagaagccagccctggatcaaagaccagccaacctgggccacatgcagagtctgctgctgcagaggaaagccagcggactccatgcagctgaccagaatgcagccacacatctgatcagacatgccatcgggagcaacgagtatggggaaatggagccagagcgtctggctgccatgttgacgctgccagaggatgtggccaggatgtaccgggatgacatcactgtcatggtggtgttttttaactcagaatcaattgatacctattttaaggagggttaagagtctcaccctgttgccaaggctaactcgaatgccctttatttagaacatttccactcattccttagtgagcaatccaaaccttagtaaagaacaggcagacataggttgctgagtaattccggaattc

SEQ ID NO: 501 - DNA, 1511 bp, Rattus norvegicus
tgggctcaaggaaggaagcgttgtagctcgcgtccaggggcgcggcgtgtacgggtggctctcttcgcagctcgcggaggcgaaccgggcaacagtgacatggcagaacaggatgtggaaaatgagcttttggattatgatgaagatgaagagccccaggtaccccaggagagcactccagctcccccgaagaaagatgtcaaaggatcttatgtctccatccacagttctggcttccgggactttctgctgaagccggagctcctgagagctatagttgactgtggctttgaacatccttcagaggtccagcatgaatgtattccccaggccattctgggtatggatgtcctgtgccaagccaagtctgggatgggcaagacagctgtgtttgtgctggccaccctgcagcagattgaacccatcaatggccaggtatcagtactggtcatgtgccacacaagggagctggccttccagatcagcacggagtatgagcgcttctcgaagtacatgcccagtgtcaaggtatctgtgttctttggaggcctctccattaagaaagatgaagatgtgttaaagaagaactgtccccatgttgtggtggggacaccaggccggatcctggccctcgtgcggagcaggagcctcaacctgaggaatgtgaagcactttgtgctagatgaatgtgacaagatgctggaacagctggacatgcgccgggatgtacaggagatctttcgtctgacaccccatgagaagcaatgtatgatgttcagcgccaccctgagcaaggagatccggccagtctgcaggaagttcatgcaggatcctatggaggtgtttgtggacgacgagaccaagctcacactgcatgggctgcagcagtattacgtcaaactcaaggacagtgagaagaatcgtaaactcttcgacctccttgacgtgctagagtttaaccaggtggtgatctttgtcaagtctgtgcagcgctgcatggccctggcccagctcctagtggaacagaattttccggctatcgctattcacagaggcatggcccaggaggagcgcctgtcccgataccagcagttcaaggacttccagcgtcgcatcctagtggctactaatctgtttggcagaggcatggacattgagagagtcaacatcgtcttcaactatgacatgccagaggactcggatacctacctgcaccgagtggctcgtgctggtcgctttggtaccaagggtctggcagtcacttttgtgtcagatgagaatgatgccaaaatccttaatgacgttcaggaccggtttgaagtgaatgtggctgagcttccagaagaaatagatatctccacatacattgagcagagccggtaaccatgtgtgtagccaggcacatggctttctctcctgctgcttcagatcctcctcctaggtggcaatcggcggcctctctttttattgttccaaagctttagctatgttaagaataaacttttattgtg

SEQ ID NO: 502 - DNA, 2151 bp, Rattus norvegicus
ggaaaacacatggtggggcctttctcagctgaacagtctacagaaagcttcgagctgcagccagcaaggaggctccaggaccatctgcagcagctgcctggacaggtgactgactacctgtctcttgctcccaggttgggcttccaggtcaggcaatggctcttctgtggctcctctctgtgttcttgctggttccagggactcaaggtgcaaaggatggagacatgcgcctggttaatggggcctcagccagtgagggccgcgtggagatcttctacagaggccggtgggggacagtgtgcgacaacctctggaaccttttggatgcccacgtcgtctgccgggccctgggctatgagaatgctactcaagcactgagcagagccgccttcgggccaggaaagggaccaatcatgctggatgaggtggaatgcacagggaacgagtcgtcactggccaattgcagctccctgggctggatggtgagccactgcgggcatgagaaggacgcgggcgtggtctgctccaacgattccaggggcattcacatcctagacctctctggagagctcccagatgcgctgggccagatctttgacagccagcaggactgcgacctgttcatccaggtgacagggcagggacatggggacctgagcctctgtgcccacacactgatcctgcgcaccaaccccgaggcccaggccctgtggcaagtggtgggcagcagtgtcatcatgagagtggacgctgagtgcatgcctgtcgtcagagacttcctcaggtacttttactcccgaagaatcgaggtcagcatgtcttctgtcaagtgtctgcacaagctggcctccgcctatggagccacagagctccagggttactgtggacggctttttgtcaccctcctcccccaggaccccactttccatacgcccctggaactttacgagtatgcgcaggccaccggggactctgtgctggaagatctgtgtgtgcaattcctggcctggaacttcgagcctctgacacaggccgaggcctggttgtctgttcccaatgccttgatccaagctctcctccccaagagcgagctggctgtgtccagtgaactggatttgctgaaggcagtggaccagtggagcacagcgaccggcgcctcccacggggatgtagagcgcctggtggaacagatccgctttcctatgatgctgccccaggagctgtttgagctacagttcaacctgtccttgtaccaaggtcaccaggccctgttccagaggaagaccatggaggccctggagttccacacagtgcctctcaaagtgctggccaagtacagaagcctgaacctcaccgaggatgtctacaaaccccggctttacacctcttctacctggagtagcctgctgatggccggtgcctggagtacacaaagctacaaatacagacagttctacacatacaactatggctcacaatcccgctacagcagctaccagaacttccagaccccacaacaccccagcttcctcttcaaggacaagctgatctcctggtcagccacctacctccccaccatccagagttgctggaactatggcttctcgtgtacctctgacgagctccctgtactgggcctcaccacatccagttactccgatccaactatcggctacgagaacaaagcgctgatcctctgtggaggctacagtgtggtagatgtcaccacttttataggctctaaggcccctattccaggtacccaggagaccaatagttccaagaccccctccctctttccctgtgcctcaggggccttcagcagcttccgcgaggtcatccgccccttctacctcaccaactccactgacacggagtagatggtacatctcagcggtggggactcagacattcctgtgttccctccttggcctccagcctctctgtaggaacctccagcagcctgccaccagatttcccttagcttccactgtctccatgagctttaaaatgtactagaaggtttcagccagtactcactccagatctgagagtctcagggcccccaattgtaggcacaaggaggtcctgtgggattccccatcagtcacagtcactaatctgaaatcattaaagtggcacgtgcttctc

SEQ ID NO: 503 - DNA, 312 bp, Rattus norvegicus
gtctcacgtcctctctgcactctggaccctgacttcaccgacatgaaaactcattactttctcctggtgatgttattttttctcttctcccagatggagctgggtgctggcattctcacaagtcttggacgcagaacagatcaataccgatgcctccaaaatggaggattctgtctccgctccagctgcccatctcataccaaactacaaggaacatgtaaaccagataagcccaactgttgcaggagttgacagtggtttgaagaatggacataaaggacaagcaagggattgtaaaattagtgttttaat

SEQ ID NO: 504 - DNA, 1552 bp, Rattus norvegicus
ggcacgagggaacgtctaggcaacgtggtctccccgcccgcgggtaggcaaaggcgtttgcgcttcccagcgtctgaggcctagggagccttcagtagccgaaagttagtcttttgcagtggagtaagggctcgcggttagccgcgtagcgcccggatctggcctcaccatgttggtcctatttgaaacgtccgttggctacgccatctttaaggttctgaatgagaagaaacttcaagaggttgatagtttgtggaaagaatttgaaactccagagaaagcaaataaaatagtaaagctaaaacattttgagaaatttcaggatacagcagaagcattagcagcgttcacagctctgatggaaggcaagatcaataagcagctgaaaaaagttttgaagaaaatagtcaaagaagcccatgaacctctggctgtagctgatgctaagctaggaggggtcataaaggaaaaattgaatctcagctgtatccatagtcctgttgttaatgaacttatgagaggaatacgatcacaaatggatggcttgattcctggggtagaaccacgggagatggcagccatgtgtcttggactagcccacagcctatctcgatacagattgaaattcagtgctgataaagtagacacaatgatcgttcaggcaatttccttgttagatgacttggataaagaactaaacaactacattatgcggtgtagggaatggtatggctggcattttcctgagttagggaaaattatttcagataatttgacatactgcaagtgtttacagaaagttggagacaggaagaactatgcatctgccactctttctgaattcctgtcagaggaagtagaagctgaagtgaaagcagctgcagagatctctatgggaacagaggtttctgaagaagatatttgcaacattctacatctgtgtactcaggtcattgaaatttctgaatatagaactcagctgtatgaatatctgcaaaaccgaatgatggccattgcacccaatgttacagtcatggttggggagttggttggagcgcggcttattgctcatgcaggttctcttttgaatttggccaagcatgcagcttctacagttcagattctgggagcagaaaaggcacttttcagggccctcaaatctagacgagacacacctaaatatgggcttatttatcatgcttctcttgtaggccagacgagtcccaaacacaaaggaaagatttcacgaatgctggcggccaaaactgtgttggctatcagatacgacgcctttggtgaagattccagctctgcaatgggagctgagaacagagccaaattagaggccagattgaagattttggaggacagagggataagaaaaataagtggaacgggaaaggcattagcaaaagcagaaaagtatgaacacaaaagtgaagtgaagacttacgatccctctggtgactccacacttccaacttgttctaaaaaacgcaaaatagaagaggttgataaagaggatgaaattactgaaaaaaaaaaaaaaaaa

SEQ ID NO: 505 - DNA, 672 bp, Rattus norvegicus
cccggagtgttggtgattcggagctgctgtgtctgtccgagatggcagaggtggaggaaacactcaagaggcttcagagccagaaaggagtgcagggcatcatcgtggtgaacacagaaggcattcccatcaagagcacaatggacaatcccaccacgacacagtacgccaacctcatgcacaacttcatcttaaaggctcggagcactgtgcgtgagattgacccccagaatgacctaaccttccttcgaattcgctccaagaaaaatgaaattatggtggcaccagataaagactatttcctgattgtgattcagaatccaactgaataaggcactgtcttggcttcctgtgtcattccttaatttaacgtcccccgagaataatagcgttaatcatgtcagtgggcacatgtggctgcctggagccatgcagaccttggcattggtgaagggcagctctgcccaccccaccaaggagtgcctctgatgatccggtcagtccccagaagagctcagttctctctccaggctttggaatgagagctcttgatgagcccacagccagcttccttctaaccttcatttcactttgtcccccttggaagctgtttttgtttttttaaactaaaaataacttcaaccccaaaaaaaaaagaaaaaaaaaaaaaaa

SEQ ID NO: 506 - DNA, 1080 bp, Rattus norvegicus
aattccgggtcgatggtgggcagacatctgctggagtccccagggctggcccgagagccaccatgaactcccaggggcctctacgtgggggccgaatgcccagcaccaaatctttcaacatgatgtccccaacgggtgacaactcggagttgctggctgaaataaaagcaggcaagagtctgaaaccaacaccgcagagcaaggggctgacaacagtgttctcaggcagcgggcagccagcctcccaggtaggcactggacgggtgccccgcccgggctcccagtgcctgcccagtgctcagccctaccgcttctcccggcagcctgagtcaccacagcctgcggtgtcacctgggccatctcgggcccggagccccaccccaccagcctctgggcctcagccactgctcaatggcagcatagtaccggcaccacctgccaccctagcaccaggagtgcatctggatgtggaggccctcatccccacacttgatgagcagggccggcccatcccggagtggaagcgccaggtgatggtccggaagctgcagcagaaaatgcaggaggaagaggagcagcggaggaaggaagaagaggaggaggcccggctggccagcctgcccgcctggagacgagacattcttaggaagaagctggaggaggagagggagcagaagcgaaaagaggaggagcggcagaagctggaggaaatccagagggcgaaagaacagtcggagaagctgcggacactaggatacgacgaggccaagctcgcgccctggcagcgacaggtcatcttgaagaagggggagatccctaagtaataggagtctcggcctcttgcgtgtagcctcacgagctctgagaaatggggagcggcccccagcccccgccccatcctgtcaggttggtgcggaagggtgggagccttgagcccttcccttcggtgcctgccggaatcttccctattcccctccctggccccacatccccaaccctgctgctggagtgctctcgcgaacccctgctgtcgcctggaaaaaaaaagtgcccaggctgctgacgcaaaaaaaaaaaaaa

SEQ ID NO: 507 - DNA, 1930 bp, Rattus norvegicus
aaaaacacagctcagcagatccgggcactggagagggagctgcaagcaggagcagtcaagagtgtggtcagaagcaccgtgagtggaccagcagggccggctttttctaccatggcggcccaaggctatggctattaccgcactgtcatattcacagccatgttcggaggctacagcctttactacttcaaccgcaaaaccttctcttttgtcatgccctccttggtggatgagatcgctctggacaaggacgatttggggctcatcacgagcagccagtcggcagcctacgccatcagcaagtttgtgagcggggtgctgtctgatcagatgagtgcccgttggctcttctcctctgggctgctcctggttggtctggtcaacgtagtcttctcgtggagctctacagtaccggcttttgctgctctctggtttcttaatggtctggcacaggggctaggctggcccccctgtgggaagatcctgaggaagtggtttgagccatcccagtttggtacttggtgggctgtgttgtcaaccagcatgaacctggctggaagcctgggacctatcttggcgacaatccttgctcagagctacagctggcgcagcaccctggccctgtctgggtcactgtgtgtggttgtctccttcttctgtctcctgctcatccacaacgaacctgctgatgttggactccgaaatctggaccctcgcccctccaagggcaaaaagggctcgtcaaaggaggagagcaccctacaggacctgctgctgtccccctatctctgggtgctctccactggctacctcgtggtctttggggtaaagacttgctgtacagactggggccagttcttccttatccaggagagagggcagtcggcccttgtgggtagttcctacatcagtgccctagaggttggaggccttgtaggcagcattgcagctggctatctgtcagacagggctatggcaaaggcagggctgtctgtgtatgggaaccctcgccacagcctgttgctgctcatgatggctggcatggcagcatccatgttcctcttccgggtaacagtgaccagcgactctcccaagatctggatcctggtattgggagctgtatttggtttctcttcttatggtcccattgccttgtttggagtcatagctaatgagagtgcacctcccaacttgtgtggtacctctcatgctattgtggggctcatggccaatgtgggtggatttctggctgggttacccttcagtaccatcgccaagcactatagctggagcacagccttctgggtggcagaagtgatctgtatagccagcacagttgtcttcttcttgcttcgaaatatccgcaccaagatgggccgagtatccaagaaggcagagtgaaaagagcactcactatagagcatccccaactgcaacctcattggcaggacacagaaaggaagagaggctgctctggctagaacagagcctttacatatctgtgtctacactgtctctctggacctccgtggtgctgcaagttaccagtggctaatgaggtcctatgctctatttaaatgatgtttggttttaggctccattggcttctgtttctaccttctagcagacagacaactcctaaattcagggtgtctcctatacccctcttcctctcctgagtccccatctcctagtgaggtggttctatctctgcagctgcagaatattaatggcctgtggtttctgctgtaccccaaggcttcttgttaggggtcaacactgttgccaatacctcagtccctaagggaggagaggaggccaccactctcatcagttacctggggacaaaagggaggaatgtagagagcaaactgtcttgtatagactaataaaactagatttgatactaaaaaaaaaaaaaaaaaaaaaa

SEQ ID NO: 508 - DNA, 1068 bp, Rattus norvegicus
gtgtcctcatcagggtcacaaacctgtgaggaaaccctgaagacttgctctgtgatagcctgcggcagagacgggagagatgggcccaaaggggagaagggagaaccaggtcaagggctcaggggcttgcagggccctccagggaaactggggcctccaggaagtgtaggagcccctggaagtcaaggaccaaaaggccaaaaaggggatcgtggagacagcagagccattgaggtgaagctggcaaatatggaggcagagataaacaccctgaagtcaaaactggagctaaccaacaagttgcatgccttctccatgggtaaaaagtctgggaagaagttctttgtgaccaaccatgaaaggatgcccttttccaaagtcaaggccctgtgctcagagctccgaggcactgtggctatccccaggaatgctgaggagaacaaggccatccaagaagtggctaaaacctctgccttcctaggcatcacggacgaggtgactgaaggccaattcatgtatgtgacaggggggaggctcacctacagcaactggaaaaaggatgagcccaatgaccatggctctggggaagactgtgtcactatagtagacaacggtctgtggaatgacatctcctgccaagcttcccacacggctgtctgcgagttcccagcctgaggaaaccagtgcctccatcgtctccttggctctcagtcgcttccaaagaaaattcagttactggtttctcaagtttagtgttaagtgattcttttgatgggagagaatgtatttgcttgtggcatgaggacacgaatagaagctgaccgggaggcaccaggatctggttgagcacggagcaaaggtcacatccattttgctaggaacacagcaagaagtcaactatggaaaacctacaataaatatcccctgcccttttcaccagaggaccaaaggtggtccttatctgtgccagagtggcagctgatctcagccataaaagcacccaattccctttctccatgaattgtcactaagtggtgtcaaacgtgcctgtttgaagtcatcctcagt

SEQ ID NO: 509 - DNA, 1430 bp, Rattus norvegicus
atggcttaccacagcttcctggtggaacccatcagctgccatgcctggaacaaggaccgtactcagatcgccatctgccccaacaaccacgaggtgcacatctacgagaagagcggtgccaagtggaacaaggtgcacgagctcaaggagcacaacgggcaggtgacaggcatcgactgggcccccgagagtaaccgcattgtgacctgcggcacagaccgcaatgcctatgtgtggacgctgaagggccgcacgtggaagcccacgctggtcatccttcggattaatcgagctgcccgctgcgtgcgctgggcccccaatgagaacaagttcgccgtgggcagtggctcccgtgtcatttccatctgttattttgagcaggagaatgactggtgggtgtgcaaacacatcaaaaagcccatccgctccactgtccttagcctggactggcaccccaacaacgtgctcctggctgcaggctcctgtgacttcaagtgcaggatcttctctgcctatatcaaggaggtggaggaacggccagcccctacaccgtggggctccaagatgccctttggggagctgatgtttgaatcgagcagcagctgtggctgggtgcatggtgtctgcttctcggccggtgggagccgagttgcttgggtcagccatgacagcactgtgtgcctggtagatgctgagaagaagatggccgtggcaaccctggcctctgagacattaccgctcctggccatcaccttcatcacagaaaatagtctcgtggcagcgggccacgactgcttcccggtgctgtttacctatgacaacgctgcggggacattgagctttggtggccggctggatgtgcccaagcagaactcccagcgtggcctgacagcccgagagcgcttccagaacctcgacaagaaggccagctctgaagggggtgcagccacaggggctggcctggattcactgcacaagaacagcgtcagtcaaatctcggtgctcagcgggggcaaggccaagtgctcgcagttctgcaccacaggcatggacggtggcatgagcatctgggatgtgaagagcttggagtcagccttgaaggacctgaagatcagatgagctgtgaggagtgctgtcctcatcccacatgctggggaggagggaaaggggttggggaggctaagggctgctttgctgaatgcttctagggtgtagtacaggtctgcaaaggggatgctctctctccaaagaggggaagaggaaggtggggaactttcctgcctatttaatgaaaatgtgccttttaaagagatgctttcattcattgcaaaccaaaaacaagacaaaaaacccaaagcacaatgctggtcataaactgcttcaaaatgtgggctaataaacataccaaatgtgaaaaaaaaaaaaaaaaa

SEQ ID NO: 510 - DNA, 7420 bp, Rattus norvegicus
atggatccaagtggggtcaaagtgctggaaacagccgaggacatccaggagagacgacagcaggttctggatcggtaccaccgcttcaaggagctctctaccttgcggcggcagaaactggaggattcctatcgcttccagttttttcagagagatgctgaggagctggagaagtggattcaggagaagcttcaagttgcctctgatgagaactacaaagaccccaccaacttgcagggaaagctccagaaacaccaagcctttgaagctgaagtacaggccaactcaggagccattgtgaagctggatgagacaggaaacttgatgatttctgaagggcactttgcatctgagaccatccggacacgtttaatggagctgcaccgccagtgggagttgcttttggagaagatgcgggagaaaggaatcaaactgctgcaggcacagaagctggtgcagtatttgcgggagtgtgaggatgtaatggactggatcaatgacaaggaagcaattgtgacgtctgaggagctgggccaggatttggagcatgtagaggtactacagaagaagtttgaagagtttcaaactgatctggctgctcatgaagaaagagttaatgaagtaaaccagtttgctgccaaacttatccaggagcagcacccggaagaggagctgatcaagaccaagcaggaggaggtgaatgcagcttggcagcgactgaaaggcctggctcttcaaaggcaggggaagctctttggtgctgccgaggttcagcgctttaacagggatgtagatgagaccattggttggattaaggagaaagagcagttaatggcctctgatgactttggcagagacttagcaagtgttcaagctctgcttcggaagcatgagggtctggagagagatcttgctgctctagaggacaaggtgaaagccctgtgtgccgaggctgaccgcctgcaacagtcacaccctctgagtgccaaccagatccaggtgaagcgagaggaactaattaccaactgggagcagatccgaactctggccgcagagagacatgcacggcttgatgactcatacaggcttcagcgctttcttgctgacttccgtgacctcacgagctgggtgactgaaatgaaagccctcatcaatgcagacgagcttgccaatgacgtggctggtgctgaggccctgctggacaggcatcaagagcacaagggtgaaatcgatgctcatgaagatagctttaagtctgcagatgagtctgggcaggccctactcgctgctggtcactatgcctcagatgaagtgagggagaagctgagcatcctctctgaggagagagctgccctgctggagctgtgggagcttcggaggcagcagtatgagcagtgcatggacttgcagctcttctaccgagacactgagcaggtggacaactggatgagcaaacaggaggcattcctgctaaatgaagatttgggtgactccttagacagtgtggaagctcttttgaagaagcatgaggactttgagaaatctctcagtgcccaggaagaaaaaatcacagcacttgatgagtttgcaaccaagcttattcagaacaaccactacgcaatggaagatgtagccactcgacgagatgctctcctgagccgccgcaatgccctccatgagcgagccatgcatcgccgggcacagctggccgattccttccacctgcagcagttcttccgcgattccgatgagctcaaaagttgggtcaatgagaagatgaaaacggccactgatgaagcttacaaagatccgtccaacctgcaagggaaagtccaaaagcaccaggcttttgaggctgagctctcagccaaccagagccgtattgatgccctagagaaagctgggcaaaaactaatagatgtgaaccactatgccaaggaagaagtagcagctcggatgaatgaggtcatcagtttgtggaagaaacttctagaggccacagaactgaaaggagtcaagctccgagaagccaaccagcagcaacaatttaatcgcaatgttgaggacattgagttgtggctgtatgaagttgaaggtcacttggcttcagatgattatggtaaagacctcactaatgtccagaacctccagaagaagcatgctctgctagaggcagatgttgctgctcaccaggatcgaattgacggcatcacaattcaggcccgccagttccaagatgctggccatttcgatgccgaaaacattaaaaagaagcaagaggcccttgtagctcgctatgaggctctcaaggaacccatggtggcccggaagcagaagctggcagattctcttcgtctgcagcagctcttccgagatgtggaggatgaggaaacctggattcgagaaaaggagcctattgctgcgtccactaacagaggcaaagatcttattggagtccagaatctgctaaagaagcaccaagctttacaggcagaaattgctggccatgaacctcgcatcaaagcagtgacacaaaagggcaatgccatggtggaggaaggccattttgctgctgaggatgtgaaggccaaactgagtgagctcaaccagaagtgggaggcactgaaagccaaagcctcccagcggaggcaggatctggaggactcactacaggcccagcagtactttgccgacgccaatgaagctgagtcctggatgcgggagaaggagcccattgtgggcagtaccgactatgggaaggatgaagactctgctgaggctctgctcaagaagcatgaagctttgatgtccgatctcagtgcctacggcagcagcattcaagctttgcgagagcaggctcagtcatgccggcaacaagtggcccccatggatgatgagactggcaaggagctggtcttggctctctatgactatcaagagaagagccctcgtgaggtcaccatgaagaaaggggatatcctcaccttgctcaacagcacaaacaaggactggtggaaagtggaagtgaatgaccgtcagggttttgtgccagctgcgtatgtgaagaagctggaccccgcccagtcagcctcaagggagaacctcctggaagaacagggcagcattgctctgcggcaggggcagatcgacaaccagacacgcataactaaggaggccggcagtgtatctctgcgtatgaaacaggtggaagaactgtatcagtctctgctggagctgggtgagaagagaaaaggcatgttggagaagagttgcaagaagttcatgttgttccgggaagcgaacgagctacagcagtggatcaacgagaaggaagctgctctaacgagtgaagaggttggcgctgacttggagcaggtcgaggtgctgcagaagaagttcgatgacttccagaaggatctgaaagccaatgagtcccggctgaaggacattaacaaagtggccgaggacctggagtctgaaggtctcatggcggaagaagtgcaggccgtgcagcagcaggaggtgtatggtatgatgcccagggatgaagcagattccaagaccgcctccccatggaagtctgctcgactgatggtccacacagtggccaccttcaactccatcaaggagctgaatgagcgctggcggtccctgcaacagctggctgaggaacgtagccagctcctgggcagtgcacacgaagtacagaggttccacagggatgcggatgaaaccaaagaatggattgaggagaagaaccaggctctgaacacagacaactatggccatgatctagctagcgtccaggccctgcagcgcaaacacgaaggcttcgagagggaccttgcagctcttggtgacaaggtgaattcccttggggaaacagcccagaggctgatccagtcccaccctgaatctgcagaggacttaaaggaaaagtgcacagagttaaaccaggcctggaccagcctagggaagcgtgcagaccagcgcaaggccaaactgggtgactcccatgacctgcagcgcttccttagcgatttccgggacctcatgtcttggatcaatggaatacgagggttggtatcttcagatgaactggccaaggatgtcactggagctgaggctttgctggagcgacaccaggaacaccggacagaaattgatgccagggctggcactttccaggcatttgagcagtttgggcagcagctgttggctcatgggcactatgccagcccagagatcaaggagaaacttgatattcttgaccaggagcgcacagacctggagaaggcctgggttcagcgcagaatgatgctggaccactgcctggagttgcagctgttccatcgagactgtgagcaagcagagaactggatggctgcccgggaagccttcctaaacacagaagacaaaggagactcgctggacagtgtggaggctctgatcaaaaaacatgaagacttcgacaaagctatcaatgtccaggaggagaagatagctgccctgcaggcctttgccgaccagctcattgctgtggaccactatgccaagggagacattgcaaaccgacgcaatgaggtcctggacaggtggcgccgcctaaaagcccagatgattgagaaaaggtcaaagctcggagaatctcaaacacttcagcagttcagccgggatgtagatgagattgaagcctggatcagtgagaagttacaaacagccagcgatgagtcatacaaggaccccaccaacatccagagcaagcaccagaagcaccaagcctttgaggcagaactgcacgccaatgctgaccgaatccgtggagttattgacatgggcaactccctcattgagcgtggggcctgtgctggcagtgaggatgctgtcaaggcccgcctggctgcccttgcagaccagtggcagttcctggtgcagaagtcagctgagaagagccagaagctgaaagaggccaataagcagcagaacttcaacaccgggatcaaagactttgacttctggctttctgaggtggaggctctcctggcatctgaagactacggcaaagacctggcttccgtgaacaacctgctcaaaaagcatcagctgctggaggcagacatatcggcccacgaggatcgtctgaaggacctgaacagccaggctgacagcctgatgactagcagtgccttcgacacctcccaagtgaaagagaagcgggacaccatcaatggacgctttcagaagatcaagagcatggcaacctcccgaagagcaaaactgagcgagtcccatcgcctgcaccagtttttccgagacatggatgacgaggagtcctggatcaaggagaagaagttgttagtgagctctgaggactatggcagagacctcactggtgttcaaaatctgaggaagaaacacaagcggctagaagccgaactggccgcacacgaaccagccattcagggtgtcctggacacggggaagaagctgtctgatgacaacaccatcgggcaggaggagatccagcagcgtctcgcacagtttgtggagcactggaaggaactgaaacagctagcagctgcacggggccagcggctggaggagtccttggagtatcagcagtttgtggccaacgtggaggaggaggaggcttggatcaatgagaagatgaccctggtggccagcgaagactacggggacactcttgctgccatccagggcttactgaagaaacatgaagcttttgagacagacttcactgtccacaaggatcgagtgaatgatgtctgtactaatggacaagacctcattaagaagaacaatcaccatgaggagaacatctcttcaaagatgaagggtctgaatggtaaagtgtctgacctggagaaagcagcagctcagaggaaagcgaagctggatgagaactcggccttccttcagttcaattggaaggctgacgtggtggagtcctggattggtgaaaaggagaacagcttgaaaacagatgattatggccgagatctgtcttctgtccaaactctgctcaccaagcaggagacatttgatgctggcctgcaggccttccagcaggagggcattgccaatatcactgccctcaaagaccagctgctagctgccaagcacattcagtcgaaggccatcgaggcccgacatgcctccctcatgaagaggtggacccagctgttggccaattcagctacccgcaagaagaagttgctagaggcccagagtcatttccgaaaggtagaagacctcttcctgacctttgccaaaaaggcatcggctttcaacagctggtttgagaatgcagaagaggacctcacagacccagtgcgctgcaactctctggaagaaatcaaagccctccgagaggctcatgatgccttccgctcatcgctcagctctgcgcaggccgacttcaaccagctagccgagctggaccgtcagatcaagagtttccgagtggcctccaatccctacacctggttcaccatggaggccctggaagagacgtggaggaacctacagaagatcattaaggagcgagaactggagctgcagaaggaacagcggcggcaggaggagaatgacaagctacgccaagagtttgcccagcatgccaacgcgttccaccagtggatccaggaaacaagaacgtatctcctcgacgggtcctgcatggtcgaagagtcgggaactctggaatctcagcttgaagctaccaaacgcaagcaccaggagattcgggccatgagaagtcagctgaagaagattgaggacctgggggctgccatggaggaagccctcatcctggacaacaagtacactgagcacagcactgtgggcctggcccagcagtgggaccagttagaccagctgggcatgcgcatgcagcacaacctggagcagcagatccaggccaggaacacaacaggagtcactgaggaggccctcaaggagttcagcatgatgttcaaacacttcgacaaggacaagtctggccggctgaatcatcaagagttcaaatcctgccttcgttctctgggttacgacctgccaatggttgaggaaggagagcctgatcctgagtttgaggccatactggacactgttgatcccaacagggacggccacgtctccctgcaagagtacatggctttcatgatcagccgtgaaaccgagaatgtcaagtccagtgaagagatcgagagtgctttccgggccctcagctccgagggcaagccttatgtgaccaaggaggagctctaccagaacctgacccgggaacaagctgactactgtgtctcccacatgaagccctatgtggatggcaagggccgcgaacttccaactgccttcgactacgtggagttcacccgctctctctttgtgaattgat

SEQ ID NO: 511 - DNA, 1259 bp, Rattus norvegicus
ggcacgagggcgagggtgcagccccggagcggcggcggggcaaaatgaaaaacgaaattgctgctgttgtcttctttttcacaaggctggttcgaaagcatgataagttgaaaaaagaagcagttgagaggtttgctgagaaattgactcaaatacttcaagagaaatacaaaaatcactggtatccagaaaaaccctcaaaaggacaagcctacagatgcattcgtgtcaataagtttcagagagttgatcccgacgtcctgaaagcctgtgaggacagctgcatcctgtacagtgacctgggcttgccaaaggagcttacactctgggtggatccgtgtgaggtgtgctgccggtatggaaagaaaaacaatgcattcattgttgccagctttgaaaatgaggatgagaacaaggatgagatctccaagaaagttagcagggctcttgataaggtgacctctgattatcattcagggtcctcctcctcagatgaagacacaagcaaggaagtagaagtgaaaccgagtgcagtggctacaacgccaagccccgtgtaccagatttcagaactgatattcccacctcttccaatgtggcaccctttgcccagaaaaaagccaggaatgtaccgagggggtggccatcagagtcactaccctcctcctgttccatttgcttatccaagtccaggaaggaagaataaagcgttccgcccaattccagtgacatgggtacctcctcctggaatgcattgtgatcggaatcactggattaatcctcacatgttagcacctcactagttcatttggattgggcggatgtcattttgatagaaaggaagaaataccttcttagatacttaagagtttcacaacttgtagtgaagtcagatggacaaaaccatcaggcttatttttatagaaaagctattgagataatctttcttaaagtatatatatatatgcactttagatatattgatatagtttgagaaactttattaaagttagtcaagtgcctgagtttttaatattggacttgagtatttatatattgtgcattgactctgttggatacaaaacactgtaggagggcgatatgttttagcacctttgagcatttactttatggagaatatgtaagttatttatacagaaggacatttattttatgtcacatagaagaattgtgtgaaatcatgtagttgcaaataaaaagtagtttgaggcgtgaaaaaaaaaaaaaaaaaaaaaaaa

SEQ ID NO: 512 - DNA, 1373 bp, Rattus norvegicus
agaggaccgagcagggcgcacggggtggcggcggcgcaggtctcccggccaagtccccacttctggctgctcatgccactgggactggggcgaaggaaaaaagcaccacctctggtggaaaatgaggaggcggagccaagccggagtgggctgggcgtcggggagcccgggcccctgggtggaagtggagcaggggaatcccagatgggtttgcccccacctcctgcttccctccggcctcgcctcgtgttccatacccagctggcccacggcagccccacgggccgcatcgagggcttcactaatgtcaaggagctgtacggcaagatcgctgaggccttccgactaccggctgctgaggtgatgttctgtaccctcaacacccataaagtggatatggacaagctgctggggggccaaatcgggctggaggacttcatctttgcccatgtcaaggggcagcgcaaagaggtggaagtattcaagtctgaggatgctctggggctcaccatcaccgacaacggggccggctatgccttcattaagcgcatcaaggaaggcagtgtgattgaccacatccagctcatcagcgtgggtgacatgattgaagccatcaacgggcagagcctgctgggctgtcggcattatgaagttgccaggctcctcaaagagctgccccgaggccgcaccttcaccctcaaactcaccgaacctcggaaggcgtttgatatgatcagccagcgttcatcaggtggtcaccctggctcaggcccacaacttggcactggccgagggaccctccggctccgatcccggggccctgccacaattgaagatttgccttccgcttttgaagaaaaggccattgaaaaggtggatgaattgctagagagttacatggggatcagagacacagagttggctgccacgatggtggagctggggaaagacaagaggaacccagacgaactggcagaagctttggatgaacggctcggtgatttcgcattcccagatgaattcgtctttgatgtctggggagccatcggggatgccaaggttggccgctactaagactgggactgaacctggaccttgagataacctggctttgcccagctggggtttccagaaaccacagccaagacctgggctgacagcttaggctgtaactccgcagcctggggatggcacaggctgcaagtgccctgtggtccaggccccgctccaatcagtaccgccacggtgcccagcctggttggggtccccggccaacccctgccgggttccccacctacctcaatagagtaagcgcatggggagggaccaacacactaggcagccagccacctctatccccaacctcgagagat

SEQ ID NO: 513 - DNA, 1947 bp, Rattus norvegicus
gggctagaggcgcgggttgaaaagtctcgttccaagtttggagagagggagagagaggagagcgtctcagacctcgctacccgcaagcggggaggaggcagaagagaagatcgcggcgtctggggagcacccagacagccagaccgagctcaggctttccgagctaggagtgcgtgacgtgcctgggagaggcaggagcgcctgcgatcgggctgctcttgactagcgagagaagtccgaggcggcaaaggggggcgaacgacccgacgcaagatggcgagtaaagagatgtttgaagatactgtggaggagcgtgtcatcaacgaagaatataaaatctggaagaagaatacaccgtttctgtatgacctggttatgacccatgctcttcagtggcccagtcttaccgttcagtggcttcctgaagtgactaaaccagaaggaaaggattatgcccttcattggctagtgctgggtacccatacatctgatgagcagaatcatctggtggttgctcgagttcatattcccaatgatgatgcacagtttgatgcttcccattgtgacagtgacaagggagaatttggtggctttggttctgtaacaggaaaaattgaatgtgaaattaaaattaatcatgaaggagaagtaaatcgcgctcgttatatgccacagaacccacacatcattgccacaaaaacaccatcttctgatgttttggtttttgactatacaaaacaccctgcaaaaccagatccaagtggagagtgtaatcctgatcttagattaagaggtcaccaaaaggaaggctatggtctctcctggaattctaatttgagtggacatctcctgagtgcatctgatgaccatactgtctgcctctgggatataaatgcaggaccaaaggaaggcaaaattgtggatgctaaagcaatctttactggccactcagctgttgtagaggatgtggcctggcatctgctgcatgagtccttgtttggatctgttgctgatgatcagaaacttatgatatgggacaccagatccaatactacttctaagcccagccatttggtggatgcacacactgcggaggtcaactgcctctcattcaatccctacagcgagtttattctggcaactggctctgcagataagactgtagctttatgggacctgcgtaatctgaaactaaaactccacacctttgaatcccataaggatgaaatttttcaggtccactggtctccacataatgaaactattctggcttcaagtggtactgatcgccgcctgaatgtgtgggatttaagtaaaattggagaagaacaatcagcagaagatgcagaggatgggcctccagagctcctgtttattcatggaggacacactgccaagatttctgacttcagttggaaccccaatgaaccttgggtcatttgctctgtgtctgaagataacatcatgcagatatggcaaatggctgaaaatatttacaatgatgaagagtcagatgtcacgacatcggaactggaggggcaaggatcttaaacccaaagtatgagttgtttctattgaatgtattgctacacgaatgcttgatttgtcaagcgccaaaaaggcattgtatagtaggaaatgtaagtgggatggcttctggcattctttaccctctgattctagcactttcaagtgagctgttgcgtactgtatcatattgtagctattaggggaacaaaaaggaatgttgcttaagaatggacatcattgttttaaacacacattgctgggtattgcctttgattcaactgtcattttctcaaacttttaagtgcttgctcaagttcccaaatatgcgaggataacttttacactttttccttccaacacttcttgattggctttgcagaaataaagtttttaaaaaaaaaaaaaaaaaaaaaaaaa

SEQ ID NO: 514 - DNA, 416 bp, Rattus norvegicus
atctgtcagctcaactacctgggagtctcacgtcctctctgcactctggaccctgacttcaccgacatgaaaactcattactttctcctggtgatgttattttttctcttctcccagatggagctgggtgctggcattctcacaagtcttggacgcagaacagatcaataccgatgcctccaaaatggaggattctgtctccgctccagctgcccatctcataccaaactacaaggaacatgtaaaccagataagcccaactgttgcaggagttgacagtggtttgaagaatggacataaaggacagcaagggattgtaaaattagtgttttaataaatgaaatgtttttgaagtttatttacatcatctcaaaataaattttatgcctcagtttaaaaaaaaaaaaaaaaaaaaa

SEQ ID NO: 515 - DNA, 1266 bp, Rattus norvegicus
ctttgctggtgcagagatcggccttgcagtttgcaataatgtctgagccaatcagagtcctcgtgacaggagcagccggtcagattgcatattcgctgctgtacagcattggaaatggatctgtctttgggaaagaccagcccatcattcttgtgctgttggacatcacccccatgatgggtgttctggacggtgtcctgatggagctgcaagactgtgcccttccccttctgcaggatgtcattgcaacagacaaagaagaggttgccttcaaagacctggacgtggctgtccttgtgggctccatgccaagaagggagggcatggagaggaaggacctactgaaagccaacgtgaagatcttcaaatcccagggcgcagccttggagaagtacgccaagaaatcagttaaggtcattgttgtggggaacccagccaatacaaactgcctgacggcctccaagtcagcaccatcgatccccaaggagaacttcagttgcctgactcgattggaccacaaccgagcaaaatctcaaattgctcttaaactcggtgtaaccgctgatgatgtaaaaaatgtcattatctggggaaatcattcatcaacccagtatccagatgtcaatcatgccaaggtgaaattgcaaggaaaagaagttggtgtgtatgaagccctcaaagacgacagctggctcaagggagagttcatcacgactgtgcagcagcgtggtgctgctgtcatcaaggctcggaagctgtccagtgccatgtctgctgcgaaggccatctcggaccacatcagagacatctggtttggaaccccggagggcgagttcgtgtcgatgggcgtaatctctgatggcaactcctatggtgtccctgatgacctgctctactcgttccctgtcgtgatcaagaataagacctggaagtttgttgaaggcctccccattaacgacttctcccgtgagaagatggacctgacagcaaaggagctgaccgaggaaaaggaaacggcttttgagtttctctcctccgcatgactacacagtcgtgttgacgtcagcagacatcccaaggctgaggaatcaaaatgtcgtctttgagcctagtaccaaacagtaataatggtacattcagattgtgaacagcaaaatattttaaatattatgtgctttgtgattcgtgaaagtctatcacgttgttagtgctgcgatctaaataaaagtatattcaagtgaaaaaaaaaaaaaaaaaaaaaaaaaa

SEQ ID NO: 516 - DNA, 1330 bp, Rattus norvegicus
gggttagtttaacatgggttcctccagctccaccgctctggctcgccttggactccccgggcagccgcggtccacctggctcggcgtcgccgcgctgggactggccgcagtggcgctggggaccgtggcctggcgtcgcgcgcgtccccggcggcgccggcagctgcagcaagtgggcacggtgtcgaaggtttggatctacccgatcaagtcctgcaagggggtgtcggtgtgcgagactgagtgcaccgacatggggctgcgctgcggcaaagtgcgcgacaggttttggatggtggttaaggaagatggtcacatgatcactgcccgccaggagcctcgccttgtgctggtcaccatcaccttggagaacaattacctgatgctcgaagctccaggcatggagccgatagttctgcctatcaagctgccctcttcgaataagatccacgactgcaggttgtttggcctcgacattaaaggcagggattgtggcgatgaggtggcccggtggttcaccagctacctaaagacgcaagcctacaggttggttcagtttgataccaaaatgaaaggaaggacaacaaagaaactctacccgtcggagagctaccttcagaactatgaggtcgcctacccagactgcagccctatccacctgatttctgaagcctccttagtggatctcaacaccaggctgcagaagaaagtgaagatggagtatttcaggccgaacatcgtggtgtcaggctgcgaggctttcgaggaggacacctgggatgagctcttgattggtgacgtagagatgaagagggtgttgagctgccccaggtgcgtgttgactacagtggacccagacaccggcatcatagacaggaaagagccgctggagaccctgaagagctatcgcctgtgtgatccttctgtgaagagtttataccagtcgtctccactctttgggatgtatttctcagtggaaaaaattggaagcctgagagtgggtgaccctgtgtatcggatggtggattagtggatcccgtggactgactcggtttggattattcacaactgacagtctgagtaacagagtgatggggaatcttgtcatttactcggcttccctgggagacgacgcatctgcaagtcctcacggccatcttcctggaaatggatctctgttcttcctctggagctgcacatgcccgagttcattcaagaaagctaccagaggtggtttgggaatgtgacggtgtataaattttagataatgaggttttaaaaaattaaacggaattgttactcccacggttaaaaaaaaaaaaaaaaaaaa

SEQ ID NO: 517 - DNA, 1778 bp, Rattus norvegicus
gagttgcggttgctgctctgcagaacctcgtgaccaggtattccgatttggagtccttgaattaaaaacaaccatggagcatgtcattggagacagcaagaagaaaagaaactagggacaatgaggttccttttcttcctgttcgttgctgttgttcaccttttctccttgggctctggaaaagctatatacaagagtggtgtttctcagcgaacatttcaagaaataaaagaagaaatagccaactatgaagatgttgctaaagcaattatcaaccttgctgtttatggaaaataccagaaccggtcgtatgagcgtttgggacttctagttgatactgttggacccagactgagtggctctaagaacctagagaaagctatccaaatcatgtaccaaaacctgcaacaagatgggctggaaaacgtccacctggagcaggtcagaatacctcactgggggaggggcgaagaatctgcagtgatggtggtgcctcgaattcacaagttggctattttaggccttggcggcagcattgggactcctcctgaaggtatcacagcagaagtactcgtggtggcctcttttgttgaacttcaaagaagggcatcagaggcaagagggaagattgttgtttataaccagccttacactgactatgggaaaactgtgcagtaccgggagcgcggagctgtggaagctgccaaggtgggggccgtggcatccctcatccgatcagtagcttctttttccatctacagtcctcacacaggtcatcaaggatatcaagatggtgtgcccaagattccaacagcctgtatcacaatagaagatgcagaaatgatgtctcgaatggcttctcgtggggacaaaattgtcattcatctgaaaatgggagcaaagacctatccagatacagattccttcaacactgttgcagagatcactgggagcaagtatccagaggaagttgtcctggtcagtggacatctggacagctgggacgtcgggcagggtgcactggatgatggcggtggagccttcatatcatgggaagcactctcacttgttaaagatcttgggctgcgtccaaagaggactctgcgcttggtgctctggaccgcagaagaacaaggaggggttggtgcctcccagtattatgagctacataaggcaaatatttccaagtacagtttggtgatggaggctgactcaggaaccttcttacccactgggctgcagttcaccggcagtgacaaggccagggctatcatgaaggaagtcatgagtctcctgcaacccctcaatatcaccaaggtctttaatgatgcagaaggaactgacattaacttctggatccaagctggagtgcctggagccagtctgcgagatgacttgtacaagtatttctttttccatcattcccatggagacaccatgactgccatggatccaaagcagatgaatgttgctgctgctgtttgggctgttgtcgcttacgttgtggcagacatggaggaaatgctgcccaggtcctaaggaaaacaagaaggaagaaccttgttctctgcagctgggaatccccattcgggattttcacagcagccatcttcacagcaccttgttatacactcaatccccgtggcacagtttctttataccttctgttaaccatctttccttgatacgcttttacctgttctagaataagtaatcatcactactgtaccaccttgaaaatactgtttccagtttaaaaataaacaataaatatatga

SEQ ID NO: 518 - DNA, 560 bp, Rattus norvegicus
cacataaaggggtaagaattggtacaaatcatagacattgtttaaatacaaataaataattctagattctaaagaaacaactctagataatcctaaagtattctctaggttcctattaaaaatagaaggctattggcatcaaattctactccacctacaaccctttgagaacttaaggatgaaatggtgaattctatattctaagaagtcaccagacaaatgggagccggtgttcccacttccctgaacgagctcccaagtggaagagtttcctgtatcacagatatacacaactgataaatctgggacttattcagtatctaaagatagctaaaaaagactggccttgggaaaagcagtaagaattcctctgaagcagttctgtggattctgaaaccccagaggtcaagcgtcttaaccccaggaagacttgagcctctgcaacccaagtcatcatgggtggcacctgcggtgagcagcagtgatctgctcagtgaagaatggtgctgctaatgaaacagtctgtcaggcctggcaacaaagcagtcaagcctgagctg

SEQ ID NO: 519 - DNA, 480 bp, Rattus norvegicus
gaaatcacaaacagtaagaaactttattggttttttttcctgtgtcaataaagtgtaccaattttaaggaacagtactgcgagtgcctgtccccctaaagccgtgcacaatacacacaaaataaaaataatcaaacaaagaaaatgaaatcatttacacataattaattaagaaccctgaacatccagaatcagattttccctacagcatgaagactgagaaggcaaacaaaccagaaagcttgaacttgaaactgaccaatagcaagtagttttggggaagttctctgtgaaaattcactacagaattactgacatgcgaaaaatggcttaaaaacaaaacagaacagaacagaacgaaaaccagtgcaaaatcttcctaaggtttttaaccatatatatcctttgactatatttactggttatttctagtctagctttccacttttaaaatctaaaattaagattaaaacaatcaaaa

SEQ ID NO: 520 - DNA, 577 bp, Rattus norvegicus
accctcactataaggactaagcttgcggacgctaaagtttttttttttttttttttttttttttattttgcatacttttaatttcagaacaaaataaaacaaacaaaaaaacacaatacacaacacccaaccctgctattctgtgggaggggatcttcctgccttaaggcacaaggacaggatagaagagattcttgtagacatgagcagagagccaggtgggtcagggccagtcaaggctgttgggggagccacagggatactatacagagggcgggggcttcccaggagcctttaatccacttcttccatgcgagaggcatcctcatcaccctccagtggggggatctcatcgggaacagcagcactgggctcttctgcagtgacctcatcttcatcaatgcccaggcctagtttaatcatgcggtagatgcggttggagtgggtttgggggtcctcaagtgagaagcagaggagagcagagcattctcaaacagcagcaccaccaggtctttgacagctttgtcctttttgtctgcctcagccttctgccgcaaagtctccacaatggggtggg

SEQ ID NO: 521 - DNA, 569 bp, Rattus norvegicus
cctcactatagggaataagcttgcggacgctaaagttttttttttttttttttttttttttttttagtattactttgacttgtgagtctaggttaaaatcattcggaggattttttattctccgaggtcaccccaaccgaaattttttagttcatatttattttgttttagcccattaggttgtttttatataagttgaactagtaaattgaagctccatagggtcttctcgtcttattgggagattccagcctcttcactggaaggtcaatttcactgattgaaagtaagagacagttgaaccctcgtttagccattcattctagtccctaattaaggaacaagtgattatgctacctttgcacggtcaggataccgcggccgtttaactttagtcactgggcaggcaatgcctctaatacttgttatgctagaggtgatgtttttggtaaacaggcggggttcgtgtttgccgagttccttttactttttttaatctttccttaaagcacgcctgtgttgggctaacgagttagggataagtaattttattgttgggttagtaccta

SEQ ID NO: 522 - DNA, 635 bp, Rattus norvegicus
gctccaaaagtaatagttaaaattaccagtgggtaaattatcttacacttactaaactaacattatatgttttacaattttgaacaactttacaagttactgttattttcaattctgagtagaaaggtaaactccaagcaagacaaagccaatagaggcttaagttcatcaccaacaagtttcaacaatttaccccaaatttactgttaaacagtacctggttgaagacacaagctgcgccttaaataagctggagcgactctgggatgttatgaacttaaccttgaaaggaagaaggtataggaacttctatttggtttggattgtaagaacagacaaattacttacagaaactgaattacttcaatacacatgtgaagacatagaagaaaacaataaaaatttacaatccaatcaggatataaacatcttttatatcatagaagttgtcaattatctatgcacatatagttagattttagcagtaaccaaacagttgcttataagttcaacaaaattacagatgtttttcagcatttcatagccacatcgttgggaatgggttgttgagcttcctttcactttaatgagtatctgggataagcaacttataaagacaaaagctttattttagc

SEQ ID NO: 523 - DNA, 493 bp, Rattus norvegicus
gccgctgtcatcctcctcatcagatcccacatcctcaatcttaggcttctcctcatcctccttatcttcctcctccttctcccctttctcttcctctgcctcatcatcactgatctccttctcgcgttccttctccagatagagggtgatggggtagcctatgaactgtgagtgtttcttcaccacctccttgaccctcctctcctctaagtactctgtctggtcttctttgaggtgaaggatcactttggtaccccggccaatgggctcaccgtggtctgcacggacagtgaaggatccaccagcagaagactcccaggcatactgctcatcatcgttgtgcttcgtgatcacaaccactttctctgccaccaggtaggcagagtagaagccgacaccaaactgcccaatcatggagatgtctgcaccagcctggagagcctccatgaacgcctttgtaccagacttagcaatggttcccaagttatttatg

SEQ ID NO: 524 - DNA, 463 bp, Rattus norvegicus
agacataacaaaaacgaaatatttattgtataattacccccccactggacttgactgggatagcctcccagaaggcatctctgccttcccattttatttcagagcttcattgtagatcaaagccaaggcccccaggaaggcaacatactcctggaagtttacttcctgatccttgttacggtccagatcatccatcagccttgcaatttcagcatcctgcagcttagcaccaatggtgagctccttctggatcagctccttcagctccttcttgctcagggtgtgcttgtcaccctccttgccagagtacttgtggaagatagccacgagaaggccgatggcctgatccagggggcatgccatgactgaccactgggctagaagctgtttgacagaggggctattcagtgctactggtagcagagagtcctctcaccatcccctgagccaggagactacctgc

SEQ ID NO: 525 - DNA, 496 bp, Rattus norvegicus
  misc_feature (1)..(496): n = a or c or g or t
aaaagcaaaatgagaactttattgatctgaaactaaagggaggctctccatttcttggcaggacttgcgatggaaaatattttcccatctttctctagtttcctcaagtgaagcaagagattatgctccgccatcttatgtaaattctctggaacgttcttgtaaatcattttcctaagttcgctcactgagaatgattcctcaaggttatcacggaatacggtgataatttgttcttctcggttatttcggtgagaaatatattccagaattttagcttcggcattatggatcactgggccatgtcctggatatataatgttggctttgacttttagtaagtcttttagggagttcatgtaatcagagaggtcttcaaatatcgttgtcccttctcctaggatgcagtcnccagaaaagatggcattttcctcttccaggagtaaagccatgtgatcatcagtgtggccaggagtgtataagactctgagcgtgg

SEQ ID NO: 526 - DNA, 485 bp, Rattus norvegicus
gagaaagggttttactatggagccaggctggccttgaactcacagcagtcctctagctccagcctcttgaatgctgggattacaggtgtgagccaccatgctgggctgtgtctggaatgtctccttgaacaagatgtgcaaggatgtgtctgagagaaagacagtctgagtgggctctgctgtacatcaagcaaaacaccaaccccttgcttaacgccatgagacctcggctcaccctgtccaggtcccagggacccaaaccacactcactcacacagaacccacatccttgccgcccctcctagataaagtgctcaagcaaggccgcacaggctgagcccagcatcaaacccagtgacatgtagaacagcatcaccacactggtggcctcagccagctcccggggcacaatcttgggcccatacatgagcaccagcgtgctgaggtagccattactgagccccaagaggcaggtgaagagtata

SEQ ID NO: 527 - DNA, 428 bp, Rattus norvegicus
  misc_feature (1)..(428): n = a or c or g or t
gccaagccagcctaaaaagtttattacaggtgtgtgatcgggcggatgtcacgtgaacatccaagtgtgccagtaagaaaagacccaagagagcctctgcccacccactccttggctcctcacctccccagacttactcattaccctaagttaacgtgtcctgtttcagttggagtcttaggaaatcaaatcaaatcaatccccaatagtgcagacctttctaccaggcgcaccagaggagtgaagagtgtccccacacactcctactgggtgtaggacatcagaacccacactcatgatccacggtccggctgtacaaccccacccacccctctgtgtgcggggagcagcaggctctctgacccacatggcacagctcagtcagggagcgggccatcacgcagtggagcacaaggtcagttcctgng

SEQ ID NO: 528 - DNA, 505 bp, Rattus norvegicus
tatttttttttttttttttttttcaattccatcaaatttattatagactttgaaagttggcggttcacctgcttggtgtacagaagacagactctaagaaaggatctggaggcaccgcctcttctgtcaattgtaatgtatttggcaaaagtgaagactttgtaaacaccaactccatggctcaaagcagactttctccacagcacagttcaaaagccaggagaatgccaataagttagaccatgctcaacctgccagccaccacctgcggcctagagtgtggccctgctgttcccaaatcagacagacaacaaaacaacccaaacagaccagttcaaccaacagccctggatggagttctcagggcaggagatgggcaacctggggtccaccctaagcctatgcagtgtagttgtgtgggaagtgcaccatgcagaacttggctgtagttggtgttggtctttttgattttcctatattcctgaagaatctgtccgcgggttgc

SEQ ID NO: 529 - DNA, 328 bp, Rattus norvegicus
ctgcctccgctgctgtctgtcccagtcatggttgagattcctgtctcccagaagcctcctacagcctgtactggctgctttgaggatggcctggcagatgaagacgctgtgtgaaagtttctggcctgagacatgcagagctcagctaagaaaagctgtttcagtcactctttcacaaccttacccccccccacacacacacacacaaaggagcaagaggagccagcgaagccaagaggctcagtcctgacagagaagagaccaaaagctcaccctgtaatctttatcctgtggcaagaaagtgtcctccttaggaagagggacacag

SEQ ID NO: 530 - DNA, 423 bp, Rattus norvegicus
gttcctaaattttatttatgaattaatacaaaacatggcagaccaatgtgtcttaatcctcatcctcctcctcctcctcgtcctggttgatctggaagtagcgcagctcgtagctctccttgctgttggcaacgacgcgcagccagtctcggaggttgttcttcttcaaatattttttggtgagatatttcaaataccttttggagaaaggcacctcggaagtgacagtgatcttgctcttgctccgctcgatggtcacaacccctccgccaaggttaccagctttcccgttcaccttgatcctctcctggaggaactgctcaaaattggcagcatccatgattccatcttctacagggtgagtgcagtcaagggtgaacttcaaaacctgcttctttttttttgccccccttcgccacaagc

SEQ ID NO: 531 - DNA, 460 bp, Rattus norvegicus
gagcctgttggcctaccaggacccttctttcctacttcacttttgcccttggcacggtatgcagcaatatccttttcatacttctcctttagtttagctgctttctgctcatacggttgtttatctttggcagattgctcagaccacatctcccccagtttctttgcagtatctccaatagacaggccggggtgttcacttttgatctttgggcgatgttcagagcaaaacaggaagaaggcagacggtggtctcttgggagcatttggatcttttttctttcctttcttatcaccttggggaaggaagtctctctgtggaggtctgagggaagagctcgcgccaggtagacgctgcgccgtcatcatgggcaagggggaccccaacaagccgcggggcaagatgtcctcgtacgccttcttcgtgcaaacctgccgggaggagcacaggaagaagcatt

SEQ ID NO: 532 - DNA, 632 bp, Rattus norvegicus
  misc_feature (1)..(632): n = a or c or g or t
cctgtcagccgacagtttattgaaaggaaatcttgctttatccatgaagtcacttccatggaggtagctgtgataaagtgtctcttccccatgacaacgcatagcgaccaatccctactgaaagacctgcccgagtacaccaactgtcctggtggaatgacactctggagcaggaaaaacaaatttctaaaaggcatacagtgattgtcttctgagctttgcagctggcaacatgtatgttttcacacaagatatttttaagctagcgaaagaaaatactcaagcaggattagttcttaaagcaataaacaggggaataaaaacatcatgtatatataagaaaaccaaggcatgctcacaggtttgagccaagaaagacctggagccctaatccccaccttgtcccaggatgcacctgtcatgatcacagggaagagatgagtctgggatttacaaacctctctctaaacctcagtccagtgttgtgccgctggctgtaccacacacaccgnacaagccccgactgctcccattccattacggcacaggagacatgttctcaccctgcctagcctgctttggtggngggaggcggcggcagggaactctacaagtgtttccagtggtgacct

SEQ ID NO: 533 - DNA, 587 bp, Rattus norvegicus
cagcgaaatggattcttttaatcactgaagacagtacaaactgatacaacttataaaaatttagaaatatgtttctaggccatgaaaatgtctatatcctttggcccgatgaacccattcatggaattttaaacaaagaagaccaagaacagtaaagctcaaccgacataggtatgttgtagtcatagcgacagatcgaaaccaccagctgtccagagaagtggtcgggtgagtgctcctgccacacatgtgggctcaaggcagtcagcactggagggatgccgggcagggtacagggtgggggcggagcttcacagtggtaaaacgaaggcgggctcctcgcatgttgtcatgcttccacacacagctagaaatacatgttacaagatgcatagagaaacagatgcccaaaacgtggagaacatgcagggtgaagttctgatgcgtttatccttctaggcacactgtgtggcgtaactgcacccctccagggactgggtgctgtcctcacactgtggggtgagttcactgccccagggactgggtgctctgttcgcactggtgtgagtgcagtgctccagcgttgg

SEQ ID NO: 534 - DNA, 437 bp, Rattus norvegicus
gaaaggaaaactaacatttattgagcgcctatgggtatgtgtatatatgtgtatacatacatacacacccttatacaatgtatgcctggtcttgtgcaaggagttctcatctacaacattccgtttgatcctcaccccaaccctgtgaggtaggtattatcctcacgtgtcaggtgaggactacgaggctcaaaaaggttaggtagtttgttcagggacactgaactagagaccagtgagctgagactgagttttaagtctccggcagttctatcctatcccggttctttcctacccccttgagccctgtagcccatggctccccaaaaagaagcctgccccatcctgctctgcaaggatgcagtcagttgaggattaagacataaataaaataaatagcagggtcaggttcccaaaagtgaggacgtttccatact

SEQ ID NO: 535 - DNA, 501 bp, Rattus norvegicus
cagttcaccacaaaagagagagagagagagagagagagagagagagagagagagagagagagagagagaaatataaatcaaggtatagccagctgctgatcacgttgttggcagtcttttgtgcaaaataaggcgtatttgagctccacgttaagtggcacagcggtatctactggctctgcacgctgaggcaatgcacgtcgtctttccccttggtgtcatagcctggcaatggctgcccgtacttgtccacgcaccagcagaagccccgctttctgcctttggaagggcgacactgtttcttcttatagaaccccttcttgtcacagtttgggatgtggacgcccctgggactcagcacattgaggaacttcagatgattcagtgtgtcctccatttctctgcggcagggaccatattctgtctcccgcttagactcggaggagaagttctgggtgtctgtgctctgggactcatagtcaactttgtagcgctggctgt

SEQ ID NO: 536 - DNA, 597 bp, Rattus norvegicus
gacatacaaaaagacaatatttattttacttctgtataagtagttcaacagaaagcctcctagttgaagacattactgaaaacattaacattattgtatgccatcccttcagtgcccagattcagaaacatcatctgaatgaaaggaaaggaatgtaggaatgtccgctttatgttggatttacgtatgtaagtggggaaaaatctatataccttcgtcaatatatgaacttacaagttaccaataagcaatgtactgatatcatgaagagttcttaaggcctggagattacttttgtctgttaaaacaaaggtactcctatttgctgtctgtccccttcccccctgctactgtacttctgaatgagaatttgaagcaaaataggatgtctttgtttccatgctgtaagactgtcagcattgacggtttccagagcatttcaaaacatgctcttcagctccatcaacacaggccagtagtaaacaatggctctgtacaaggcatttacgatgctttccttctcagaactatgataccccggggaaggagtatttcacacttatgcaagaaagcgaagtcttgtttctactgactaat

SEQ ID NO: 537 - DNA, 646 bp, Rattus norvegicus
attttttttctattttttttttttattatggtttacagctactttatttacaactatacatttaacacaatgagataaacactgatagactgaaggactaaggtttgcagctactttatttacaagtatacatttaacacaaggagataaacactgatagactgaagcctaactaatagtactgtaacgtgtaccattttgatgactacattattttaaacaacaaactacactgaaaaattaatgccgataaaattcttggtcataatattaagaaatacaatatataaattgaaaatatgattgtttaaaatttgaaaatggaagtgaactcatttggacagagtcagacgttaacataatctgagaggggaggacctctgacccaaatgacatcgttcaggttaacagaacaaaacagaagcctagttttatcttcaaggatgacaggcagcttgcttcctcaggtggaatacactcaggctctgcatcacgcgcgtcacatcaccgagcacgaagacttcccttgtgaagccgctccgtcaatcttttctgcttccaaaattatccttcgaaaaacatccacagcagtctgattttcttttgcagaagattccaaaaaagctgcattccaagattctgccaa

SEQ ID NO: 538 - DNA, 597 bp, Rattus norvegicus
aaaaaggaaatgtttattgttgtgttacaaggtgattataaactcctctaaaaaaagcaaagatggatttaaaatatcaatatacatattcatctaaaaagcaaaagagaaaaaaaaaaaccgaaaccctgcaaaatgcggggtcgccgtaattaaacatacacagagcttgtatactgcaagacaggtcacacaccaaggatccttcaaacacaaacgctcctccccttcttggttggtttcaggtttttgtgtgtgtggtttgggacttgatgaaggaggggtgtgcacacagaggtatttacagtgtccatagggacaggggtatcaggttccagtgggactgtgaggggccttctctaaggtgccttcctggcttacgtctgcatcttggagagagaaactgggctggcacctgttcgactgcttgctagagcattgccccgtccagaggggcggggctggaatgctgtcggccatggtagtgacaccctgtgatagagaaagccccttcctgtgcggagggggcacatgctgctttctcctcatgctttgccatggtctgcatagctttcctctcatgctacttcctgcata

SEQ ID NO: 539 - DNA, 149 bp, Rattus norvegicus
cctactcaggctttattaaaaaaccaaaaggtttagggccaagggagggaaaaagggcctggtcaaaaggcaaccccggcaggaggcggctaaacggtccttggaggtcaccccagggctcacaaaggcaaggaatttgcccaaaaagg

SEQ ID NO: 540 - DNA, 623 bp, Rattus norvegicus
ggtccatgaaaatcgcgagaagggtttaattccgtaagtccatactttcagcctctagatagttttacatcattatctccagagcacagtttgattttagaaataggaattatttcccaatatatactggtcactcactaagacaagccaggtttaataactatggcacaaaacatttcacctcacagtactgaatacaacaaatgtttaccatgagctgtaagtcaatcgcaaagcagggcacattcacaaaggagagggaagccaatgagcaaattttcagaatctcccattgattagtaagttatagctctcataatttcacttgtatttcctactaacactttttagagtcagggtctcattaatggcccaggatggcctcagattcacttatgctaggaattgaacccaggacctctgaaagagcagccagcacccttaacctctgagccatttcccctgcccagtattttagttattttatgcttatgaatgttctgcctgttggattctttgacttgaacctgggtcttctaaaggagcagcaagtgatcttaaccactgagtcatctgtgctctccagtaacttgactttaaactagatcctatggcctattata

SEQ ID NO: 541 - DNA, 547 bp, Rattus norvegicus
aaaattataaaattcttttatttcaattatatgacacttcagtttgcctcaaattttactgaggttttggtcattttgcattccactctaccttgtaacagtagtatgaattcacatgattctgtaacgtgtcaacagcagtcatacagtaatcctctggtgattgtatatgtgctaatacttttagattcaactttacagttattttctaaatgattctttatatagaaaatacatacttccttcaggcagataaaacaacaactttccaataagaaaaatatcgagaaacaacaaataaaaatatctataccagatgcaaaattttgaattattacctaatgggtccctttgcacaagaacagccttttgtaatttttaagtagacattcaggcagaaggataactttaaaattgaaaaaaaaaataatggctgtttctcttcagtactaaagtaggaaatataatttcaacatgtcattagcagagaagagtaaaaaataaaatattcgatataaaatgaatttatcacatcacccgcatcttt

SEQ ID NO: 542 - DNA, 571 bp, Rattus norvegicus
gagaaacataacaatttaatagatgaaataaatactccagtacatgcagggtaaaaacttgacattgggggaaaaaaatcactctatagtgtaatttaaaaaataaaacacacgctcacagttgctttccccccacttgcaaagcatatggcaaagtcatactcttttcacaccatgtatactctaattcaacaaaaataacgacatacaaaaaggtagctacatccatgtctaaaggagtgaaaactgaggtaactttcatttaattaaaaagaagaaagaaatgaacccatgacctctttcctgcccaattgataactgagttgcgggtctggagtgtgtaggggtaatcctgcagtcaacacactacccatgttctctgtgtctgagtccctatagtgggctggtagacacctgggccctctgtgtacatgttgagtgcatggccctgccttctggaaaattcctcttgagcattaacatggggaaaaagggggtcacctatggtttctttggtataaatggagaggggaggagttaagtgtcttcttttagcctggggcctcgtgcc

SEQ ID NO: 543 - DNA, 558 bp, Rattus norvegicus
ggtctcaaaccatttatttctcccgaccggaaggtggccatcattacgggtggataaacacagaacggggcgtgcagcaagactcgaagaacagcggtgcaggtaagtgaggcccgggctcaagcgaaggtggaaccgttccagcccacgttggctgcgttcatgtcgtaatagttgatgtagacccggtccgggctgatgtgcaggcgatcggacagcaggccgcacagcagcttgctgtagttgcggttctgggcgccaccgatcttgccgatgctgtgcaggctgcagagggcgcaggggtcgctcgtgccgctaaaagtcatgagctggtccgggaccacgtgcactgcgatgtactgtgccggcttgccggtggcctgcgccagctgctgggtgagctcggagagaaacccctctggcacggaggcgcggggaaaattggtgttcacgatgaacataggcatggtggcggagagactgcgagcgacggccggaggacggtgtaaagcgcggtgtgacccaagtctgggacctgagctacgtgacccagctcag

SEQ ID NO: 544 - DNA, 601 bp, Rattus norvegicus
acatctccaacagatttattttaaaggaatgacctaagggagaaaaaaatgggggtacagaagtatggactagaaaataaatacaaatgtaagctgttttactaattttataaccacaaacgtgtacagagaatggtgccctgtacaaaacacaacagattcaaacgaggtgttcccttagcaaggctgaagattcagtctctggtatttggaatttaggatgcagtccttgtttttggatggatcactgggtgtttggcacagtccatgctattaaccagatttgaacaggagaatggccacctgacccaggtagaagtagatgaagtgtttggtctcgtgtgtcacgtagctaccgaagttccggcccacgatgcagtgccaggtggggttgtacttcttgtcaaactccttcttgatatgggccgcgatatccttctctatgttgtacttctccaacgcctgagtagcgcactccaccgagtcctgttgcatctcttccgacatgtctgcatttttgatcaccgccttccggtcgcacatggttaccgtggagcaggggccagccggctgctgcgagctcctagggaaggtgctggcg

SEQ ID NO: 545 - DNA, 383 bp, Rattus norvegicus
gccttcataagaatttttattattatttagaaatgcagttatatacatagaacaattaaaattaaattaaactttgtacaaatattaaaatactatcttcatacccactgcaatgtacaggataccaaaaaatatatatataaaataaaataaagcaaacccagattgacatcctgcacagtcaattaagcatgtgttgttttaaaccatgacgagtaccattctgcaaaggatcccatagtggtgcacagcctcaagaagccaggccagtatggatacagccatgcaaccctcaactacttcctctccctactccgcattccccacggtgagctctgctactgggagaggacagggtagggtgtgtgtgtgtgggggggggg

SEQ ID NO: 546 - DNA, 104 bp, Rattus norvegicus
ggcaatgcacacctttaatcccaggtcttggcataggtaatgagtctgaagccagcctggtcaacacagtaagttctaggacagccagagctatatggtgagac

SEQ ID NO: 547 - DNA, 244 bp, Rattus norvegicus
catgtgaaagatttattggggtaggtagtgggtggaagagaaaaagagccgtcttccaagacctgggcaggataagggtgcactcctttggccacaggtgatgatgcggcttctgaccctgagggcctgagagcaggctggttctggaacgtgggtggctgttggttacaaacatccctccctcttatttactggctacggtgagaaattcggatggggtgatccatgaggccacacaggatca

SEQ ID NO: 548 - DNA, 396 bp, Rattus norvegicus
gcatacgtctatgtaagcatataccacgtgctggggggggaggggtctggaaggccagaagagatcgtcaatcccctggaggtggactcaaaggtacttgtgaactgccaaaaagagtgctgagaatccaactcgaatcctctggaagagcagccagtcctctcaaccaccgagccccctctccagcactcaaaactgttatttaaaaaaaaaatcaataattattgggccgggagtgtaggccagtgggaaggtccttatctattcatgaggggctttaggattcccagcctcaggaaacaaagaagcaaaaccgaacacttatttcaggactgatctgtggcaacgatttgaaaaaatgatcaaatgaataaagcatgcaaaaaccaggcatgg

SEQ ID NO: 549 - DNA, 480 bp, Rattus norvegicus
aaaaaaatcacaggataactttatttataaatgaatgctattttctctgaactttaaaaacccatgttttaaagtgtacattagcccttcttcctgtctccattctcctcaataacaaattttattaaaacgccatttaaaaaaaatcacaggataattttatttataaatgaatgctattttctctaaacttcaaatcatcagttactcttataacagagaagaatttaaataacaccaccgaaacggaatggagacaaacagtgctactacacggcaccgtgctgcaggccggacggattgccaatcagtcttgcaacacggtccacttccagtgaaatgttcaggacagctaggaagcactttccttcatactgactttattgcaaaatgtcctaggtgtgggctcttgatcgttttggagctgatcaaaagtgtgtgttctgtagaggcagatgccgaggaaccaccgagagttcg

SEQ ID NO: 550 - DNA, 427 bp, Rattus norvegicus
gctgaagattttctatatacatatttatatatacatatatagtattttatttaaaatgtcattgagcatatacagttcttgagtttttttccaggggacgttgcacctaaatttcaaaacacacaaaatagatccccctttaactaaacaggttctcgtttggggtttacaaaagtcgaggtttcacaatcacgaagcataaaggtacatggtttggaaaccaatctccagacagattcttatcgattcactgtatgtagagtaattttttggaaacccagatcaccatgtatgtattcttacaaatgatcctcactggggcccttcctgggtttccaaagaaacaaacaaaattagaggcaaattgggaatgaagaagtgatggctggatcccctaaacacacacacaaaatactcatctaatgat

SEQ ID NO: 551 - DNA, 540 bp, Rattus norvegicus
cccttatagaaaggcacaacagaaaaaaatgattagtatataactataagaacatttacatccaatcaacattcttcaaattcatattttaaaaaaaaaaaaacagcttaagtgataattacaggggagccttggaaggaccattgtgagaacagttctcttgcgcaacaaactcgagacgcggcttgccagagctctttagacataggcatttttatcaaactgttttgaagggcctgtggttttaaaatctccttctccgccttgatacttggtccgggaagacatgactgacgtgggtccattgtacgtgtagcccattctgggtgttttgttgttgtcggatattgaaaagcaaaatatgacaccgccaatgatgcagagagaagctcctgcccatccgatgaagagggcagcccccaattcatacttttgctccataaagaggggatcaaagaattccgttgtgattttgttcgcgtacagggaacagcccgtcatggaacacagacctgacaatatgaatacaaccccagccaa

SEQ ID NO: 552 - DNA, 566 bp, Rattus norvegicus
ctatatttaaaatactgtttattgtgatttaacattaattagcataacatctaagagcaatatcagataacttttacacatttttccacaggatactgagttcacggctcattcattatgtcaaagcaagtaaagagaagcattagcaaaaaggtgcaatagtttactgctgtgtttaaaaaatatttatgcacactgcattcatttagatatatatatatattttctttaaaagttatggaagaggacaattcacaggttactgtgtctacacatgtgtaatacaacgaaagtgatgcagaacataaaaccctcacacagttcccgattcaacgttcccactaggagactaacaggttccagtagttagtgaggtctacggcgacgtctgcggcatcacacgctcagacagaaccagcccagggagcactgcggtcacgtcacgtctgcatgccaacttacccgccaggcgttttgcttccactcactgagtattgagatcattcatttacagtgatctgtgacattacttgggaaaatggagaaaactatattaaatctagatt

SEQ ID NO: 553 - DNA, 421 bp, Rattus norvegicus
aggtttataggcatttaatagtttaccaattggtacaataagatttttaatatgcagaaaacatgaataaattttgttttacacagtctgagagcaacaaatcttactgtaaaacacaagagcaatattatatacattcctttactgatttttaaaattgtgtcgatatcttcagtgaactcttacaatctggggaactgttttttccaattaccacctctgcaacgttcatatgaaatcaatgcttgccttcatgtcagtgtcaggatcgacttctaactcgtagagtttgtgtttatttctaacatcttcagagtgagctttggggatgcctttaggataagcaggcgagaaagcagctacttacatgatacagtgaaaggataaaaaggcccgtttcagtcgtgacttgtgagtccag

SEQ ID NO: 554 - DNA, 515 bp, Rattus norvegicus
  misc_feature (1)..(515): n = a or c or g or t
aaagtaaactctttttaattgaacatttctgtctcctgttattctgcggggtgagaactgtccttccttacgcacaaggaccgtctcttcgccatcaaactgtcggtgaggggttaggctacgagcaagcccacagcctcttcagggtagggagctcagaccgtgattgtatttgcactgtttgagggcctcgctgaagccctcacacagggttaggtcgctctgagtggtggagcagtccaggaactgcttgatctcataggcgcagggccccatctgcagggggtgagaggcaggacgggcaggggcctgctggaccgcaggctgggcaggctctgagcttcccccactaaaggcactggtcagggcgctacccatgacatgccctacagctgagcccacagctacgcccgcggcggtggatgccatctgagccataagacccggctgtcccnaggtggcaggtgcggnggcggnggctgaaggtggtgggtgcgcangaggatgggctgggc

SEQ ID NO: 555 - DNA, 664 bp, Rattus norvegicus
  misc_feature (1)..(664): n = a or c or g or t
agttaaatacgcacaattttattgattgaagagattaggacaaaaacattaaaccaaatacaggacaaagcaccagaggccattagtccccatcatgcatgttaccaatctttcctcccacccaggactttaaaaacaggggagagggaagataaaaggtccttcttgccacagcaccatcttctgaatgtaaaaaccctttctctgtatcttccattatcaaaatagaatcaagggtaaatccatggcagctttgtcccctgattatcaatggggaagctgccctcctggggacaggggctccagtggagtaggcgtgaagcatccaagagtccgcacacacatgccacatacgagagtgaagcacagattcaagtaacatttacatactagagtccacgtgttacctacccaaaaacaggaccatttcacaanacatatgcaagcagtaaaacccaaatgactgaggtactgggaacacaaatatttatgccaaaagagttctgtatcatacagcaatanaaaagccagaatacaaaaggaaaacattttgccactcgaaatcaaataaggctatctagagagagccaaataaaaggttattccagggacagatatactcaatacaggggaataaaattataaatgttaaactacagcatgt

SEQ ID NO: 556 - DNA, 605 bp, Rattus norvegicus
aacagcacctgtaaaaaaatgaagacagtattctaagattctaagatatagatgtggactttggaatgttagattgtcaaaacatcaactgtatcacatcagttaacaaacagaaggcaaggcaggctaaacaagggcagaatcttgttaactagaaatattaatagcagcaacttttgaaagatgattttattaaggtcattgcacttggtcatttattgctacagcacaaggccattcaattgtaacacttctcaattctgattgcaaagattgtctcattccgctcatacatttcaagtttaaatgcaagcataaaacattcatcaaaaaaatctacagagcacttagaatggatttcttgtctgtgatcacagtaaggagtgtaaggagtcctctgtcagaccaacccatcctcttcttgcatcctctgattttctgtgaagtcctggacagttggatagaggtaatacctttatagaaagagcaagcttagtggtcacaaacacagcaaaataacattgaaatcactagacacttagtggtactgtgtttcaaagaccagcaaatctgaactgtacattcactagtaatttggcaatgac

SEQ ID NO: 557 - DNA, 439 bp, Rattus norvegicus
aaaatatgcaatatatttcgatatcgtatacaatttaaatatggcgtgatagcacatgtcttgttaatttagaatatagcttttgaggggcaaagtctatagttgatcacatttaggagctttggaatcctggctcctggatggaactggtgatggaggaagcccctgagctgagggactggtcttgttgcagggaaatgagctgtacaaccatcttcatttttagaatgttcttgaaaacaccttattttcctggctactccttggtagatatttggaataaagtagtcatgctgattaacagtgtatagagtatgttccaggtcatcctgtagctctgagacgatgcttgatttggtaaaacagtgtaggtagttaccatccccgcatgaatatggtcagtcacatggcagtggagtaaccaggttcccctcgtgcc

SEQ ID NO: 558 - DNA, 394 bp, Rattus norvegicus
ctttctttgtgtagactgtgggtctgtgtctctttaattctggaaaaatgttctccacttagaaaaaaaatgggcttcaaatttggtaacaaaccttatttacaagagacttttagctgtgaaaatgcacattcagactagcaggagaaaaataacaatgcaattctttcccaggaggcttcggtgtctctttgaaaatttaaattaacacaaagtagcaaaccttgaattaaaaaaaaaaatcactgtataaaccttatcttttaaaaagtctcctcaatatttttttcattctatgacattctacaaatccttgacttttttttaaactggagacattatgccctagaatttccttaattgcactttaaatatacttgaatttacccaccct

SEQ ID NO: 559 - DNA, 477 bp, Rattus norvegicus
ccaagaaaataaatttattgaactttgaggggaaaaatccacagacataaaagaaagttaaatacagactgcaggacacaactagtcacatggtgaataatggcttgtgtggccagcaaagtaccaaaaatgacattctgggactgattgaggtatttagctatttttggctatagcaacgtggtcagcctatggtgaaatggtaagatagttcatcaaaacacacatctttaagctgaataggttctaaattgatgatacttcatatgaactaaatcatgtacccattggggaaaccatagcagcaaggtatcagaaaaaaatctattaaaatctactacagaataacacagtgaaccttaaacacccaagtctaaatttttcactgtctctcctgcatgaaagagatttaaaaaccactaaacattaaccctgtttccccacaaaggtctctgcaaaatggtaaatatcattgaa

SEQ ID NO: 560 - DNA, 105 bp, Rattus norvegicus
gacggctatcaagtgcgttttattgaatccattgtggatagatgaatgttacacctgcgtgtcgggaggggcaaaggggcaacgagggatgcagctgcacatggt

SEQ ID NO: 561 - DNA, 519 bp, Rattus norvegicus
  misc_feature (1)..(519): n = a or c or g or t
acagaatataaagatttccctcattaatctctcatgtgaaggggattacaggccagaaggaagacacattctgcacacaaagtacacctcgtatgtgtggcactggagacaaatggtgtcgtgctcctgcacataaattaggaccaagtggtgacatcacacatcaggggtggggagaaatatcctagtcaatcagattcaagaagcacacgacacagaaactgcaaattcgagcaagtcggcagctttagtcagaacactgcaggtctacagggctgaggctacagtgcacacggagggacacggtgggaagggctacttagaaaggctggagaagtgagggagtttccactaaagcanatgaacgtcttgccaaacagacagaatgaaagggagcgtgagtgttagtacatccagggcgtgcgcgtttgttacagcagtgtctgcagcatgctaagttagttacaacgtcttcattggtacggacgaatcattcatgggcttggggtttgcctcttc

SEQ ID NO: 562 - DNA, 463 bp, Rattus norvegicus
aaaaacgcgtggcctttatttggctaaatgacaaaagccaaaataattctgcacaaagcattagacagtaacgtgatacactgaactcagaggctaactccccactgacgctggtgatgtcatgggtgactctttccaacagtgttttctgttcaggagcctcaaagctaaacgcccgaccaaccaactaactgttcagaacagccagtttctccaatggagtggaaggtgctcacgtcaaacctagtgagacccagctggggccgtccgaatgttaatcctggcattcctgttctcttccccaatctcatgccaacaaaaagttctggcaagctgaatatatttcttttttcttttaggagagttaacttttaatagtttaagtccaagaacatgtcctacttattttgaaaaatagaagctagggaccattctttatcccatgatagtctattctgtgaga

SEQ ID NO: 563 - DNA, 689 bp, Rattus norvegicus
aaaaatttaagagctcatttatttaaactttactctcattcaaggcaccttccacaatggttgaccaggtctctgggtactgtggcccagcaaagctgacacataagatcagcacacagggttgagaaacaaacaggtgacatttccaatcgtttatctgaaatccacagggattagctcaatgatcctccgggtacatgagggaatcgtcaccattttagacatgaaaggttagagaatttacatggtttttttgggtgaccaccttggggggtgggggagacaaaaagccatttaaacccaaccactgggcaccggagtcactactccctccagtggcatcacacagaaccatgcgacaagtcgctggcagttcgttagattaggaatgagaatccagtgcgcccggcacctccctccgtggccactttgagtaggtatctggcattttctcaggtggcagtaaatgcgcctcacagtatagaaccagcagaatcgggacatttgcagtctagccctgctccctgggaagcaacatggaccctgaaaggaagcaggacagagccggcctggtactggtgcctgcccctgagagtgatgagggtagcccttggtgacagctataccaacttcatgcggacccctggcaaatgtccttgaaaggaaaccccacatgctctcaagccact

SEQ ID NO: 564 - DNA, 471 bp, Rattus norvegicus
caaacaagtcactttaattccatacccacaattttacagatctcagtactgaaagctgtcgggcaagagggacaaagtataaatatgtctgttccgcagtgtaaaccagaaatgacttgttaatcacaaaaagtgtacgcaaacactaggtctgggaacctcaatgccagcgtagcgggaagacactggggttggcctgcctctgggtcagtgcctttccctgcttggaaattgctagggttcctgaggggcatccgctcatccccactgctccctggatgcgtgcagaagcagtcatgttgacaggggccccgttgaacagcagcttcctcagacatcctcggtaggcagggggctctggccaggcagcttcaaacttgggcgggctcccaaggtgcaaaagcgctggagaatcagccaaggtctctggcaaacggcctgtggtgtggttgctgtgtgtgtcgacttcta

SEQ ID NO: 565 - DNA, 426 bp, Rattus norvegicus
agaatgcgtttgcattctgatttagctgaagacaaactatgtaatagaatttgtttccttttaatatggagattatttcttatgtacagtgattataattatatcaaaaaggtgaggaaaagattagactcatgttttaactagatggtgatgttagacaactcagaagccctctttctttatcaggcttctcctagaaaagtaaggaaaaatctcttctgtagaatggaaaatagacaatctgaaacaatttttaatacaatattgttctgttgatataaaattctcgtagtagggtaccgagtgtattcataatcctagtgctttaaattttaggcatgaagacctagaattcgagcagtattcagtacatcatctctagtcaaatagcagccacacagttgacggtagccagtgaatgactcc

SEQ ID NO: 566 - DNA, 426 bp, Rattus norvegicus
cggcacgacagactttattttggcacttaaacaaatttgctttacagcagtgacaaaatatttgccagtattttttccctggcatagatattccaagcaagtcattctacaattagggtttcactgttttgcacagttagaggtataaccactacattctcagcctccgtgattgagggcattgtgcagctttggaagggcccatcatttcctcttaattctaaataaggtgaattacggctataattggacagaaattaaggccattaaggattcagacacaacactgttccaagtgttactttagttttgtttgaatgagttctgtgacaagcccagggaaggtgctcaaagtagtcaaacttttatcgaaagttgactgtatgttggaaaagttgcggttcttgctgtcttctttctacttcc

SEQ ID NO: 567 - DNA, 478 bp, Rattus norvegicus
  misc_feature (1)..(478): n = a or c or g or t
caaaacatatatttacctttccactcggtacacccttgagcacctttgccagaacatccctggaatgtgtagttcacccacccggcatcccatgtccttcctagcccttggtgacaaggcccttcacagcttgcacaatggcggccatgcggatctggtcgaaggcgcgtgtgaagaaggccgcaaaagtgctgcagaagggcactgtcctgtcacgtgtggcacagcccacagcaatgctcaccatgttctgctcagcaatgtagcactcgatgaaacggtctgggtgctcctttttgaagagctctgagaaggtggaatttttggtgtctccatccagggcgatgatgcggtcactggcgtggcccagcttggcaagggccaatccataggctttccgtgtggctatcttgtcccccactttgtanttgggtggggtaggcattgatgttggcaatgctgcagcatgatgtggggt

SEQ ID NO: 568 - DNA, 643 bp, Rattus norvegicus
actaaaagtttgctttatttatttttttttgtgaagtcaagtgctagctattaattacagttagattttgttttcgttcttttcaaatgttatcagaatattagcatcaccttatcagtaatcaaatacactaggtttcaatgtttctgtccacatctagaatgttcaggtgatcaggaactctcttactggattcctttagatttgagttcttgattatatttccagatccgaaacagctgagaggctcctgctgaccccacaaagaaattaacagcgaacaaactccaattttttggtataattacaagtgagtaccttgaccaaataaaccctgtagccatcagcacagtggattgagctgtgctgagtttctctgcaggtctggccatgtcagctaatccagcacataccaatccccacttcattatcggagcccagaaaaaaactgttctggggcctgccgggtggttgtatagcggcctcaatttctttggcagcaacaactccactttatccatgagtcggtggtaggtggcccgcaggccttgggcgccggcagctgccatctcggcggcctaaggatccactgcagctgggtgggaacgccgctgtgtccgcgttcctggctgacaatgaaagg

SEQ ID NO: 569 - DNA, 468 bp, Rattus norvegicus
gaggcctaaagcccaaatcctgcaagctgggctccaggcccaggccttcctcagggcccacagagcccacaaagcccagggggcacaaaagggaaccccctacacacaaggggatccccaacctgccgccccacctggcacacaggtcaaaagcccctttggggctggtatcaaatctagcttaatccttcttgctcccgtgttgctggctggggaacttttgatgcaccactcggagggtggtgaaaaaattgccaaggaagaggaacggaagcaggaaggtgaggcctttccacatccaagactgaaagccctccacagggaggtccatggtgtgtcattcgcccagggctcacaggcggtaaaggcacccgttctggtagtaatactgcaaaaactgcacaaaactctggtacatggagaaagacaggaactggttccggaacttctggtacatgagtccatttg

SEQ ID NO: 570 - DNA, 495 bp, Rattus norvegicus
  misc_feature (1)..(495): n = a or c or g or t
cactcacacacaatattgtatgagacattactagttttcatatgcatccataggattaatactcatatggagtataacatggaaaagtgcagaactaaagaaataactctaacaacaaaagaagcacacgtttcttaaaatttaaaaatattgcacatagtaaggttgcacagaaattactggctgcttttacaaaaagaatgaggtattagtcaatctctagataaagataagtgcaacagagtaactacacacacacacaccaaaaacaaaaaacaaattcatacgaagacctagaaagtcaacanacaaaaatattcaaaaagaagtttacaaagctatgattttgatcatacaaaatcattagcccattactaaaacacaatttcttggcaatagtttataaattttaaactttcttcagcttaactacgtgcaatacaatcatccccatcacaccaattctcctgtagaagaggaatctttctgtgatag

SEQ ID NO: 571 - DNA, 482 bp, Rattus norvegicus
  misc_feature (1)..(482): n = a or c or g or t
gaaagtatcaaaccagaattttattatatataaacacatttcttaatactgctctttcattactttcaacccgcggaaggaaggagtggcccagccagacagaagatcatgtgaggaacaagcaacgcacacgaatctgtgtatcggtaatgctactgcaggggaatatgaaaccagactccgtaacaaagcgactgtttccttgcgctcttatttggctcctcggcgctgcctgaagtagcggttgtaggcggcgttgtacccgtagatcagggcgtagcgctcacacagcttgtagtcatcacaggcctccctgttgatctcctgngcaggcttgttgagttcccggactctttcctgggctttagcgtgccatctctgctgaggggatataaaggtgttggcatttctccggttggtgaagggactgacttcataggattccatgctttcgtgagattcatagcacagggctgccacgg

SEQ ID NO: 572 - DNA, 518 bp, Rattus norvegicus
caaatgacaaccagcaggttatagctctttattgtctcagtctacacctggcccaggaatgctcccatgagcagcctctggttcaggggagagcttggtggtagtctctggacagtctgtgatggggatatcaccagaggccacaggagctgcagggctgtgtgaatagcagcactggtctcctagttgacaggtaccctctttgaatcgtttgcaggggaatgtcttgaggcgagcggcgcgctgggctgggtcctcagctggctccttccgcttattctgcagcagcctccgcctctctgccagaccttcactcgctgccttgccccctggccgggcacggggccggggaccccagttggcttctggattggcctggaagcgcttaagtcctcgctggcgggagctggggttggcatcttcccggatgttgaagttggccttcagcctgggctccacagcaagaattcggaatgctggactgctttcagatagccgctcccgtttcactggacact

SEQ ID NO: 573 - DNA, 473 bp, Rattus norvegicus
gcgatgaaagtaaatatcatttattagatagaagctagctgcccaaaggccttcatcatttccccccacagttgacagttgttctctacgggacacataacctttgtgcatagacaagcaggaaagggggcttagtggtacttgtgagcaagggcactggccactccagctaccaccttctggaaggcagcctgtgcagtggagttcactcagatgagcaaaggtgcccttgaggttgtccaagtgtttcaggccatcattgaaggcatttatcaccttcttgccatgggccttcacctgggggttacccataatagcagaggcagaggacaggtccccaaatttagaaaagtacctctgggtccaagggtagacaaccagcagcctgcccagggcctcagcgccaacattatcagggttcacctttccccacagggcactaacagtagccttctcagcatcagttaggtgca

SEQ ID NO: 574 - DNA, 574 bp, Rattus norvegicus
actgaaatacgttgtcttacccaacccacccaaaaataaaaatcttacccttgtcctctaatctttcccttatccccagtcccatccccggccctgcacaagtgccccggatttcctgcccattggctatatcggagtgtgtccattatgtagcaacgtggaagcctctgtggagagcacagagtgggtgaaggacccttaaaaaggtgctcatttgagagccctggccacttgctcataggccagctctatctcttcatcgtcaggacaggtggaggcgaattcttcccgagcgtaagcgttgctcaagtaccgatgcactccacggaacgcctccgggatggtgaatcctctgtactttttgcacaccacctggactatgtgaagctttggcagcaggttgcagtcagccagggtgagctcattgccatccagaaacttcctctgagagatgccctcatcctcggcgctggtttcatccacttcttccgggaggggggatgtcaagtaattgtctagaaccttcagggctttcaggagtcccttctctaggttgtcattgagggccgggttt

SEQ ID NO: 575 - DNA, 632 bp, Rattus norvegicus
cagtttgagtcttttatttataaatgtacatttactataaaagctgttgtgtcttagacaacttttcatttttaatttttttaaactatttctcagaggcattttagaataaatattgtgaatgaaagttagtgtaaccgatacagaatgccgccacccagaacagggacatcctcctgaatggactcacagcaaagagtgggtcacttcggctcactgaatcgtatgccatgtactgggaactagactatgtatcgtgttaatgactcgacacagaaaggaggacaaatgccatgaaagtgtgctagtgagaaacagtcacccatttctgtccttggggaagaagcctttggagtctgagaggggaggtcccgtaggagccacgaatcgctcacttgccttgtctggttcttaaacagacacatttacatcacagctccacataacagagcatttttttctccctgggatctcagatattatttgaagagagatagatcatagtcttttatgctgccttggaaaaacggcaagatgtagcctgccgaagttgccatgtaactggctctaaatgaaatagaaatcaaatagaaatagaaacggttggcaattagaatttcgaagacgttgga

SEQ ID NO: 576 - DNA, 424 bp, Rattus norvegicus
aaaagggggcagcctggtcgacttttattacactttctgggaaatggccaattgggttcactgtctgagggggctccttattagtcttttggactaaaggggcaaaaagatcacatgtgtcatccaacgtggccaaaagctcatttggcatggtttccaggtcatccattcaaaacaaagcatcgaagtcaaactttttcaggtccattttctccaacatccaatctgtcccggaaaaggcatcctccttgccggtgtctgaggcactgaccaacccatccatagccagccattctgaggagcccgccttgtcgctggaaaacccatgaggtttgaagtgcttggccacctccagatagtcatttaaaagacctaggcttttttcagcccccaaacccgactggtcaaagggggcctcgtgcca

SEQ ID NO: 577 - DNA, 532 bp, Rattus norvegicus
ttgttttacatgacttatttattatatatacatcatatatatccacacatcacaaatacttaaaagttttcttttgctaggagcattttaattttgctaagagtattttattttcctactcatgtgtgtcgttttatcatgaatttctacagtgaacatttttatagaatttctagtcagatgcttatcggttgttccttgagttttgaaaacatggcggctaatctgctagtatcagccatttccactgtctcgtttgtcagaggatacagcatccagcaccgacgactggtagaaacgatgtcaggtctactcctcttggcacgattacttggagctggtgtacttggtgaccgccttggtgccctcggaaacggcgtgcttggccaattcaccgggcagtagcaggcgcacggccgtctggatctcccgggacgtgatggtcgagcgcttgttgtaatgcgccaagcgcgacgcctcgcccgctatgcgctcaaagatgtcgttcacgaacgagttcatgcctcgtgcc

SEQ ID NO: 578 - DNA, 636 bp, Rattus norvegicus
ggatgttaaagtagttacagcaatatacaaaaacaaacaacaacataaaacaacccacaataatataaatttttacactagaaagtatacattggaatttgagtgcagtgaccaggacagaataaaagccactgtactgggaggccaagcaaactgcaggcatggctgggtgaggttggggacaagtggggccaaggggaggggaagtgggccgttccaagggctcactatgggtgattaacccagatacagacttcccagaacccctgaggtacaacacctgccccagagaagccctcaccttgttcctgggtccccaggattggaagccatcaacatgcccacgccttgccttcctaaataccctttcagtttatgagttcagcttattgtgtaactaaagaacctggccagggaagggagagcaatgactgcctcgaagcagaaggctggggtggtcaaggcaagcagtttgtcttggagacaatgtcctcactgcccttaattcagacactggttaactggagaaaaacaattccacagacagatcagctgagtaaggtggctttgagtcactgaatctagccatgcccctgtatcaagggaggcttgccttgaaccactcagtgttcaagt

SEQ ID NO: 579 - DNA, 561 bp, Rattus norvegicus
aatggcaggtcaacaaatatcctgaaacatacatagattctgatagtcttctaaccccagttgaattcaaacttgaaagtaacacacgcgagctaagggaagtcaatgttgttccaaggcacttactgaatctccatgactagacgaaaacaagaaccattagggtgaacaattagacagtatataatataaaaataactttttgcttacaatttacaaaaggtattattattacactctttgatctctgataacctgcaatgctggctacacgaatccagcaagtttaaaattcagaaacagttttctaaaatttcagggcaaataatttacaagtaagatacacaaagacttaaaccatgcagaaattcttacatcttctgttaataatattttaggacttcaactttatcaaattatatacctacttgccctgtacatatacaaaataatgcatacatgataaaacagcaaaagagtagtcctttaactcagtttatcataaaagtattactatattaacaggtctacaagcagcttgtaacagggttaagagacatt

SEQ ID NO: 580 - DNA, 573 bp, Rattus norvegicus
acaaaaattaaaccaaataaggaaaaaggtaaaagagagagaaggaattttacaaaatggcaactactaggatctggaagatgcagaaatgtcttcattccattcagtaactgggctgcttctggaatggacctccgcagataatgaagtcagagagtgcccctctcagtgttcaggtcaaaaaccaactgggcaggaaggacggccttcaaaacagtgactgtttaaaatccacacagtgaggtttagccagaatactcaagatcagaacttgcatggaccaatctttttagttgtaacctagatttcaagtccagggacacgttgtaccatgttaagaaagaaaacatgatttcatgattcaactcggactggctaaaatgagactgtgggtcacctaagcagccaatgtccctacagaagcacaaagacatgattagaagagaggagtctgagttctgtggtctggtcaactgctcagcacaggaaagacatcccatccatctggaaaggttcagcttctggacggcactggcccctgcagtgggaaggaagacgtcgccacggcccatg

SEQ ID NO: 581 - DNA, 539 bp, Rattus norvegicus
aacagtatacaagagtttatttaatgatatgaatttagctccatcacgtagggccacgttacaagttccgtctgggcccattacaactctaacaacaaaaaaaccttaaaaaaaaaagaaaatccacaactttctccatgtcattaaatatattcatatataataaccataatatattagtacgcattggaaagggacactggcccaaacagtatgtcatggtcacaactaaacatttacaattctgtgtgagcagaatcggcgacacaggagggaggctggcttagtttttggctggggcagggccccacaaagagaattttgatacccctggggtatggcatggctctggtccacaggaatgtctgtctgtgaaccacagcccattcgtgagcctaacttgcccactctctaggtttcctggatagagcccttcagtgttgagaccctaaaggaaccatctcccaggtcagtcccaaagggtcttcatttcagtcctgttccagctcggggcaattctaagagagcctgaatgtaac

SEQ ID NO: 582 - DNA, 631 bp, Rattus norvegicus
ctgccttacaaactttattagtctgggaaaagggggacaaggagttcctgtcccttcgtccactactgtttaccattgccgttgatgggacggttcaaatggtcaggggaggacagaaaggccttgatcttggggcgggcactgaggcgagccacataggcagagagcagggggaagttgtccaggcagccaggggccaggacttggtggaccagcagcaggtccagcaagttgtaatctgcaaaggaaatctggttacccacaatgaaagctttgcctccctggttctgggacagcagggtctcaaaaggtttcagatgcccaggcagggccttcacatagtcatccttaccattctcatagttagtgtagatgagggtaccatatttgcatcgaaggtcctccaccccatcattcaccatatccaccaaggcagcctccttctggtctttcccataaagccctaaagagcgacccaggtgcctcaagatggcattagattggtaaagggtgaggtctccatcttcaaacttggggagctgcccatacagacaagtggacttgagcgagccttgaagccagacatctatggtaaccacctcctccttccagctctggccctggtcagcca

SEQ ID NO: 583 - DNA, 651 bp, Rattus norvegicus
tttccacatttcaacatgggaaatttgtaaattggttttatggcaagactgttttttattgtgaaaccactagctactgtttacaatgaccaatgtcccaaggaaaggtatggggatttacaacttgatatcccgttaactaagggaacatacaaactatctcaggattccgcagaaaaaatatagacaataagaagtggttttaaacaagtgacttaaaactaaattttcaaatgcttacttttggcatctggcattaatactttttaaagttttacaataaaatatcaccgtttgggaaagttaccacatttcctaatgaccgactaatgacgttacctgaattaacactgatggaaagtacacaagcaatcaataacttaccaacagcatctcaacttcagaaacacaagagttaaatttagcatcttcagtgtttggcttcttgggccaacaaactacttctaaacaatgtatgtgcacacttattcagataagagggctcctttggcacctgagttgagtataatacaaaaggaaagaatatctaacataaagctgtttaaaggctatatcttatctatctatacatatatacacatacctgtacacatatatgcacacacatatacaagaagcatacattttttc

SEQ ID NO: 584 - DNA, 666 bp, Rattus norvegicus
cagtaaaatcagcaattgtttattctagaatctagctatcccattattaggacacaggtattcacacatttgtagtaccagctagatagccccaccattgctttgtcatccctaaggagctccccagttttcctgtgctcctgtacttcccctagggtgagagggaagtctctgtttcctgtgcagtgaggtcgggaagatttcttggggtttgaaggtcttgatgttccagggcccctatgccattagggtgttgttgcatcctctcaaacaggataagcatttcacagtgtggggtctgtgggaacaggtccactgccacagccttgactggatggaatggggtacctttcactcggttagatggggctctgcagagatccacaaagttgcccatggctgccctggggttgcaggaaacatacaggagccgcttgatgttctcagctttcctcatggccagaatcaccttagaatgtaggccagcccgtggtgggtctagaacagctacaagttgctgggaagacagtttgctcaccaagcctggcaccagatcctcagccctgccgcagtggaactcaacgttgctcagctcattggtgagggcgttcatacgggcatcctccacagcctcctggcacagttcaatcccatttactttcttca

SEQ ID NO: 585 - DNA, 614 bp, Rattus norvegicus
cttgcggccacgagatttttcttttatttttttttttttttttttttttttttttttttttttaattttataacattgttttaatcaagtaatgtagctgtttgaaacaggaaactttttaagacacctcaatagagccatgaaggattactcttaccaggttaacctccatgaataaaaacccagattgtgtgaaatttgaatcccactggtttggcaccagaatgaacagaagcccaagaccttcctaagtgtctaagacctgaccatttccctttaaagcaacagctctaagacaaaatcttgccaacctgaggccgaaatgtgctgatctacttgagaatctcaaaaagtaatgacatatggatgggctgcccatgcaacaaagagtctgaaacccaggagacaagtgactttccaagtcccacttctttggtgtgacacagcacattcccctgttaccattccaggtatatggctcctgttccacgcccagcctcctatcaaggttttaattttaccaaatgtttggtatgattttaacgcatactttttacattaatcaaagtcttataatctgtgagatggatgacacaaagaataagatccaaata

SEQ ID NO: 586 - DNA, 572 bp, Rattus norvegicus
ccctgtctggatctgaagtatatcttttaagcattgtttaaaagagaaatggaatcctgttcaacactttcaggagatgattcaagttgtccataaaaataccattcttgttacaaattgttagtggaacttaaggagaaatgacttatgctcactgcgggtcagcatgattctgaaaggtgacttatttacaaggccagagcaaaacattgtcttgcttactaataaatgtctagagttctggcaaatgatcttgaacaggaaagggagaggtatgaaaaccttaatttttaaatagcaaagttcttgtctggttattgtcggtgactcgcagacattctagagggaatctcaatcagatcaacacaaggaacaaagcaatgagcactggaacagccaggagcctgagaaaatgggaatacaagccaggtttctgaataccaccgacgtcacgggtcttcataggcttcagtgaccggtcccactgggttaggatggcgttcctggctcctgaccacttccctgggcctaccaaccggaactggtaggggctgcaagggccaaagaacact

SEQ ID NO: 587 - DNA, 436 bp, Rattus norvegicus
tttaatggaatagctttggcgcaggcaaaggcagctcctagatatctcagggcatgtggagccccaagaagtggggacgtttgctaggtttctgggttttatttcctggtgcacgaatggttggtccctggctccaggcctcgcgcatctgttcagccttcagtagcaaagccttgatctgtgcattagggatcagagctgctgcttatgcagaagccaggaggtgcgtgaagaccactggccggtcttcacagcgcaggaagttacgctctctgccacaaagcgagaggaaagggaaggaagcctcgtagcgcccgctgtggttgggtctcagacgggagaagaaagtgaccaggaattgcaggtctttgaagcaagtgataaagttctcattttggagtcatctaggaaaagctggccttggtgattcacatag

SEQ ID NO: 588 - DNA, 484 bp, Rattus norvegicus
caaatttgaaaaatgtaccatactgcattattgcaaaaattcactggtacaaaacactttgcagctggtgagaaggcaataaaaagttgattttaaaactcattactataaattactgttacagtactttgcaaattcaaaatttcaaactgcatttcctttttctaaattgcccacagtactcaaggttcctgaagctaaggcagctgtttgagaggaggggaagaggtagtagatttcaagggatttccatttctcgttcgatgcccacatacttcagggcatcagcctggctgtatctgtaatcaaagaacaactcttcaccagtctggatagctctcttagcaaagatgcctatcctgtggtcaccattaaccatcataacttttgcatagcagtttggatttactgaatgattagcaaaacgaattttgttgcccttgcgggttgcatccaacacaaaatcattgttcaagttgaacaa

SEQ ID NO: 589 - DNA, 522 bp, Rattus norvegicus
gggaataaatactttaaacctttttctcttataaatatgcattagaacatttgacaacacaagctaagggctttgaattaacttaaaattagactaagtcctgctttagcagcaggacagtcagttaaaagtccctgtccccgtgttcctcagtcccgaggcaccttaaactggtctttctccctgcggatggccctcatggtggtcacagggtcggtctctccagcgtgctgctgcacggtcttctccttcactctcatgaaggggttgtaagtgaactcctctgccagggtggatggcaccgtgggctccccgatggcattcttctccttggcccacgccagtttctcttgaacggcggtattgccgggctccacatggcgcgcaaacttaaggttgtttacggtgtattcatggccacagtagacttttgtgtctggaggaagccggcctaagacttcaagcagcgccttgtacatctcgtctgcggttccctcatagaacttcccacagccagcaaca

SEQ ID NO: 590 - DNA, 368 bp, Rattus norvegicus
ggcattccaatacactttaatcgaaaagactttggcatggcggcgggagagctgccctaggctgccagggctacccttgtgggctgggcctcagcggcggctgccactcacacggtggtgatggcgcagctcatctccatcctcttcctcatcgtcattgtcctcaaccatggtcagtgagcgcaccagcttgcacatggccacttcttctccagtggcgttgctgagagccgtgcgaaggctgcgcccacagccccaagtgttctgtgccttccacaccaagtcagtaagggggctatgggtgaccccatctcctgaatcccagatcgtcaccacctgcccggcctttagggtgaacttcggtggga

SEQ ID NO: 591 - DNA, 487 bp, Rattus norvegicus
aaaggtcacatttattaggagattaaggggtgcattatccatggactataaatagtgcacagctgacacttcagtcacagtcaagcagaaatgtagccagctccaacctattttgtagacactcttgttcttttgttccaagaaaagtttgcaccgtaagacttggacttgggtttcggaaccttcctcccttccacgtcatagctccatccatgcttttctgcaaaggcaaccgcatcttctttggcactgaaggtgagaaccatgttggagaggggatcggccgttgatgcccaacccatcaaaggattttcccatctctctctggtatcaaactccatcttccatttcttcgtgttgtttactccagactgcatgttattgcgagcaggaacaaagattctgacctttctggttttgatgtgctcttctggaacaccagttagaggagtaacatcctggatggaactctgcagacggaaaccgc

SEQ ID NO: 592 - DNA, 670 bp, Rattus norvegicus
gcggccgcacgtgttttttttttattttttttttttttttttttttttttccataataccaataaatttttttaagcagaaaaagattatagatttgacaaggagggttgcaaacaaagagctattttgaattggaggcaggttaattatattaaaaaaaaaagacgtctccagaaaaaaaaatctcttatttttttcagtgcaatagttaagttccttcatattatagagacatacacaatgttaacaaccatgaaaaacaatacaaaacgccctccatttaacaagtagaaaaatataactactatatatggcaactgtgaatctaatactgtacagaagtcatttgtgggttttacaaataaattatagcttaaatgcttttttaaaatttgttcctccccccacttcagatgtacaccagaagttacaacaggaaaagtcccgtgcctaacagacggcaaattagtgccagtcgaatgttctgcccacgagcttgaaaaatttcttatttggctcatgaaaatattcgtgcagtttatcaagtagtttgggatctacttgagggtgcgcccggcctttggactcatgtaagcagcggtccttgccactgtcccgcaggcagtagaagcccttggttttgttaaagtagaagttcgaggcgttgatc

SEQ ID NO: 593 - DNA, 348 bp, Rattus norvegicus
gcaaactctcatttattagtgtaccactcaatcttaaaaaaaaaaaaaagaaaaaaggaaaagaaaaaagaagaaagaaaaacggctccaaagctagtcttacaccattctttacaaaaaggaggctgactgctccttctaatgcaccggcccacaccccaatctcagaacacttctctcctgtttcttggtcgtggacgtttccaagatgagatttgatatttcgctcccacagcttctggttatcggaaaagccatgctttcctttattaaaggagtttggtccggctgatgttggcgtgtcccttccgatgttcttcatcctcatcttcgcttctggaggcattt

SEQ ID NO: 594 - DNA, 507 bp, Rattus norvegicus
gacatatcataaaatgtatttaatagaagtcacacagtaagaatatggaagcagttcagatataggtttgtatcttagaaaacaataggcagaagaaataggaattccacccctgaatgaagacagtagtacccagcagtgcatgtttgacagtggcggatgaattaatactccaccaccatctcccccacatgttcttaggccacaatatggtgtttacctaattctttattagaaaaacgacatttttgaatactcagttcataatacccataggcacagttgaattctgttagctcaaatgaccggccactgccagctctgtgaaatttctatgtgtccaaaactgcacgtggtcccagacctacagtgattcactttccacgggctcaactttacaatcgggtgcaaaaatggcatgtattcagtagagactgcttttgaactgggagcttttcctgggttcacaatgtgtgacaccatcctttggagacacgggacagtggc

SEQ ID NO: 595 - DNA, 498 bp, Rattus norvegicus
caccacagacactaagatgctcgagtaaatgctggagaaaggccttttaataactgatgcgaagcggaaccctgggcatgtgctcgctccccccacccccccttcagcatgcagctatcgtcacatgggctgatcaagagtcacagtcgagtttcatgagtctgtctcctgtagcagaaacaatttcaccgagtgcacgcaactatggcagagtatcaccattctcggcgaccaggttggtacatctacaccatagtaaacattaaaatctgagtccgtaaagcattgttaaatcacacaaaccaggatttcgttttaaatgtatttatgaaatctgctgctgagtccaagcatgtaggacacacgaccacctgatgaagctggatatggaaggccttcagtaggtccaatggcggagtctttcactcgtcccaagtatctccatatttgtttactttgacttctttttggggccctctttcctgcataggcctgact

SEQ ID NO: 596 - DNA, 446 bp, Rattus norvegicus
cagtctgcaggagaccatatcccacccatacatacccatgcacacaataatggcattcacccaactctacctgacaaacatcttttgaatcacagggacaaagtcatacttggtcattcccacactgctggtgacaccagttacatttggtctttttcagaaataagacagttgatgtcccaagaaagctaagcccttaactagagaggttaagaaccctggaaccagcaggcacaacttgaaatatttgccaactccttcattaaaaggttattcttaagactatcttcccatgggttgagctaaaaccactgaagatggtctttctgtactttgcagaggacagaggcacactcctttatggaggcggtgtgtaagctcatgagtgtagacccattgagcctggctgattctgccgtcctctatcacagagaaggaaggcagaa

SEQ ID NO: 597 - DNA, 539 bp, Rattus norvegicus
taagcctgcggccgcatgtgtttttttttttttttttttagactttgacaatactttttattgtttatttagcccttcacagctcaccccacacagagaaaggttcttatttgtagtgggtagctcattttgtagcttatgtggggaatatggttcaagcagaactcatgtctggctgctggtactgcagagcaaaggggaatctaggcacacccataaagtgggttgattggcaggctggaagacaaagctcccaaaaaaggcactttaacagggatgtagctcagtagagagtgcttgcccaggaggcacacagctctaggttcaatctcttgtaccataagcagtttccatggggtcagagaatggctggagagttgtggaaaccagaggaggtattgttttggagacaggacctcactgtgtagccctggcctcaaactcagagatccacctgcctctgcctcctgagtgcttggattaaaggcatgcaccaccaccgccgcctgacaggaggaagtttctgatggaggagctat

SEQ ID NO: 598 - DNA, 395 bp, Rattus norvegicus
gcctgagtactgagcagagaggtggaagccagtccaagaagctctagagaacacaatcctgtcccctctgtccctgtagtctcctcccacagtctctccagcctccttggctgagcccaggcatctgcaggtgaatctcttctgcagtcaacgttgggactggaaggaactggattcacagctggagagtttgtgaagtcaaacccgggggctcgtaatcccaagagggcgaggagaggccaaaggctcaggatactgcagaggccacacccaaccggttcctcctctctgcagcacacagggaaacacatccacatcgaggggccttcaggcctgcctgtccttccaggaaggcttcagttctggagttcatgcctgaatcaggtccggggcca

SEQ ID NO: 599 - DNA, 568 bp, Rattus norvegicus
  misc_feature (1)..(568): n = a or c or g or t
atcaggatagaaatttatttaaatccaaaataatatgactatagttagaataatataataattatctaaaggaaatatcatcattggctctgaaacagtctaacggtgtcatttttctggagtcaaaaacatgtagtaaaaggatatacaggaagcaaaaatacagaagcaagccggctgagtgaggaagctgtaacaggagggtacactaagatactgtaacaatcgagacaggaagacaagtatagcaagctgtcttacctatcaacccctgcacagtaagtcagtaacccagaatgaaggaataatagcacgtggttaacaggacaaatttccctctaatttgtctttgtaactgatttctttccttttttaccatgggttccatctggttaacaaaacatttggttttatttgtaaagcagagtaaataaaatatcctgatcagagtgctcaattttgtttaaggtgctcaaggttcanacttaaaaaggtcaactgggctagtcagtgggaaccattgggtgtgtttgctaaacagatgaaagcagcagcatttaaaatggat

SEQ ID NO: 600 - DNA, 652 bp, Rattus norvegicus
gctgtgaattttttttaatttgaaatccggattaaagtgaaagcagtgggagtgaagctttacaaatttacattactatgtcattgacatggcttttacactgattggatacagaaagaaagagactaacattagaattaaggcagtgacaacatgtgcaaacgcagcacaccccctgacaggcctcagtggaaaagcactctggtcagttggtgtctgacgtggctgcatgcaggtctcattgctcagaaagataggccctgaagagcttcattccttaaagggaaaaaaatccccgtcactggccaacgatggccaggagcagcttcctgtaatctccactggtgtcacttgcaatcatcgtgcttagagtcttctgatacatctgggtgaacatctgttttatctgaacgaggtcaatctcactccgagtgaccacaatcctgaccagggtggagtcatctgttccagcgcctttcatggaatagtagagtcgctcggcgaagaaggcagggcggttgagggcgcactgcaatatggtcttcaaaccgctttcaacgtatccggaaaattcccggctcacactgcttagcaaatctcgattagccatcctggaataagcctccatggtggctctcagctgagggaagct

SEQ ID NO: 601 - DNA, 694 bp, Rattus norvegicus
ataatcaggacagtgatctttaataaaaaacatctctagtaatcatgatcttgatgtagattgttcataggtacattcagaaatcactttctggccatgagaaaacatcatttacaaatttttaatgtcccaaaatacacattaatttaaaaaacttgatttatcctggccacttttttctcttggccagcaacaataatcctgagtgcctcaacaaaaattctgataaaaggaaaaatattgggaccgttaacaaatgtcttaaaatttgtctttaaaagggggaaaagtgtttaaagaacacatggagctttcttaaagttctttaacaaactaccttgggagctcaattcaaaaatagaacttgatgtactaaaacagacgtttcagcgcagctccaaaaatctttataaatacagcaatttgcaaggacgatcctggatcagaagtgttattccttgtgtatattgtgtgcatgccccatctcagttgtcataattgtctctgtaatttcctcctgagtagcggtcatagccaccctggcttctgccactgtagtctctagaccgcccatacccatatccatagcctccaggtcggctgtcgtatcttccacttccatatccctggtctccaccacctctagagtagctgcgaccacgcccatgggccccaaaagcaccccctctgggtt

SEQ ID NO: 602 - DNA, 455 bp, Rattus norvegicus
ggagatgtttgatcagatgtaataacactgattccaggccaggacagagggtattgcccctgaagcaaccagtattctgtggcccaaggtgcccctccgttcccagacctgagttccccgtcggttagttaaatagagggagatcttcccagggagtcttgggaggagggtccgagtcctgtacccgcctcgtccacgcagaggtgtctgagcacaagctatttacagtattcacatccactgtaccccaccaaaccaaggcaaatactacaagtggtccttccccgtggggggaggccagagaggctatgagtgtatgtgtgtacggggaaggtgggtgtccgagcgtgtgagcacatgaacgtgctgagggacaggacctgctttcagccaaagacatcatcagtctgtaaggtgcagattgaaaacaaagaggagctctgcctccgggagcc

SEQ ID NO: 603 - DNA, 399 bp, Rattus norvegicus
accgtataacttcagttttaattttccatggtatttttctttctgtcttcatgaaatcacctctttacatgggctttggtggaggtcgtggtgcaacgccagcaggtctgaatcgtggtgggggtgttcggtccttccgggcctcacgagatcgattcctgacaaccttgctatgaatggcacagctcacgcagtagtgcagcttgacatagagcttgggaagcacgtaagcgtcgaagacgcttgcttcagatatgtccctgactgcagcggcttctacaatgttccgaatgacaaacttcttaatggccttatccttgggcacgcaccgggcgcagttcgtgcagcgaattggttgcacatggccgcgggcctttttggcacgaccgttgtttctcc

SEQ ID NO: 604 - DNA, 474 bp, Rattus norvegicus
atgaccaagcatcacaaacacttttatttgtggttatcagttatttttacagaataaagaactcattaatttgtaacactgtacattaaattaaaatataacccatccctacatcaaaaattatctaagttgaccaagataaaaaaagtctctaaaagcttatatacattagaagtagcaaaaataataataaaggaagaaattagaaaacagacatcaaagtcagacatctagaagaattctccaacatctgctctcttatctcggcatttgcttcgggcttttgttcgagctttgaaagctgcagagttatataaatgcctttcaaaacgaggaatcttcatggttttaagtgttgcagcatcgagcatcacagggggtcccagctcaaatacattgcgaaggaattcatttgtctgcaagtggtactgcatccctgatccaagagcctctttaaacgtgtcataagtgtgc

SEQ ID NO: 605 - DNA, 446 bp, Rattus norvegicus
gagaaataaccaatttattctggcgcagacaggcctgccttcccctatacaaatagctccctctctcctccatccccaagataaaatgggcctctgtctcccatagctgagggtctgtcagactctgggcacactggatggctggaagatcttctgtttggaacagcccatcttccaccttggtggctgctcaacgaccctgagcacagggaccatgaaactcaacggagaccacctctggatgtaagggtttgtgggggaccctctcactgctcttgacaagggcaatgtaccttaccatcttaagcctagacagcatagataccaggatttaaaaaaatagattctcttggggtgcaaaggagactatctacaaaaacactgttgtccctggaaactaggaaagggctcatcagctatccaggaggtttctggctaaggcaagg

SEQ ID NO: 606 - DNA, 508 bp, Rattus norvegicus
gccattaaaaaactttattttgatttttttttttttacaaaggatagccccactttggggtgaaaatatatttggttaagtacaaaatatagtttttaatcatacaaaaagatacacaaaatacaaaaacaacaaagacgacacctccatcagctcacactttctggctgcacagttctcgggtggagtgcttagagtggagcttggagctctgacacaggacacggaacaaagtgctaaggcggagtaagttttggagtgctagaggccacggcgagagcagaactttctcctaacactggacaggaaatgggtctgggagcttccatggaaacctgcagttctcactgtgcctccatcactgttagggcatctcaatgtaagagtgtcaccagggtccagctgtcagcagcaacccttcatatgagtagtgtcagaatcacagaagtctgtgtgttgggggaaagcctccaaaagtaataaccaagctgggcctttaacctcagca

SEQ ID NO: 607 - DNA, 478 bp, Rattus norvegicus
tttttttttttttttttgcattctttttttcctaagattttttttttttaatttgagtttctgtagttttatctttttttggtatcgaagtcaggtttttctgggcagaaaaaaataaagaggaggaataaagaagcgaagataagtgtgaggaaaaagcaaccgaaataaaaataataagattaataattaagtactactaccacaggggaggaaatggagagaaagtgtctgtgggcttaacagctacccagaagtccattctactccagcaggaagaggtgatggtaaaccaaggtatacacggcaacgccatttctcaggagggaattgctgctgttggaaacagagcactcacactcgtacttagagaatacgaagaaattctgggacacagtttgttttttaaatggggagtctatagcattgacctgatctgaaatcctgaggagctgagtttctaaaggccacactcatt

SEQ ID NO: 608 - DNA, 369 bp, Rattus norvegicus
tttttttttttttttttgtggacgggttactttatttcatagaaaatcacactgaggaattgataagtcaagtatactcagcttggattcaccgccacggactccacactggagggtgagactgccagagcctacatgcccagacacatgtgcaaaggaacgcagagacaatctgaagccacgatgtccctctgcagggactcaggcttctcatgctgagctccccacagcccctgccccacagtgctgggtctcagcacagggctaccactttccttgttgagagaatgttgcagtggctagtttggctggaacaacaaaacctcagctccatgccctcaaacactaagttttcagtgaaataaaagc

SEQ ID NO: 609 - DNA, 377 bp, Rattus norvegicus
  misc_feature (1)..(377): n = a or c or g or t
tttttttttttttttttaatgaggctgttttctgtgcttcaagcaattggtgggttatcaactggtgtgcaaaggtcccttgtctgtacacatagcaggattttcatacagcttccccaaggcctcgaggtatgcttggattgatggaagtattcgtgtctgtctgctcaccccaaccccatatacctcttgtctgcctttctactccatggagtcagcagtgctggttggagtctttggctggttggttggtttcatanatggtggtggttgctgcctcgtcagagatgagctgtgcgtgcctttgagctgcatggatccctggcccttctgcactgagacagctcctccagaggtctgggagtgacagcataaag

SEQ ID NO: 610 - DNA, 457 bp, Rattus norvegicus
tttttttttttttttttaaaaaacacaactgcagtttattccagccatgtttcccaggagcagagaaaagctacgctccccggggatagcctgtcggttgtatctactattttgcaagcctgaccttgcatttcgaacacctcaaacctcttgttctgtgcactaaggagaaaaagtatcaaatctatcccatatgtacaactctacagtcaccataacatcactgtcatcgagtaacacttgcccttcagggcaactaaaggtcggtcagctcatgttcctcacactcctcccccatttcctttaggaagtgaaaggctactacaggaaagcaaacattcaaaccatcaaaattcagacaagttatttcaagataataaaaaggggaaaacgtgactgttaggcctgcagagcacagaactgctggaacacagccaggatgtgaggatctaactct

SEQ ID NO: 611 - DNA, 482 bp, Rattus norvegicus
tttttttttttttttttacaattagttcatggtttttattaccctggctgtttacagaaaagtattttccactgttaatttgggcataagaatagctgtttattttgtgacctttttagaagttttaaaaaatgaaaaagaaaaactgtatctgagatcttagtatcattggttttaaaaaaaggacgggagaggcttctgtttcatccatcagtaactccgaccaaacaaggtgtagaacttggcaggattcttgccacagacacacatggctcctggctgcagctcacacagagggttgaaaggaatgcaaaggcttttggctcccatggatggagcaccaggttccacatcctgatccctggccgttgtcgttttgatccagtcttcacagtcaatttccccacagaatggaatctgtgcaaccttcccagaatctagcaccttctgaaagtcttccagtgtatccgatacaaccatgt

SEQ ID NO: 612 - DNA, 484 bp, Rattus norvegicus
  misc_feature (1)..(484): n = a or c or g or t
tttttttttttttttttaacccttctccagaacagctcgcgcggttaaaaaaaataataaatatttaagagaatacaaggctcagattggtttcatacacattgcacttgaagttgaagacccaatacttgcaaggtcccatgtgttctacgctgtccaacacacacaggacactgcgcaccgaacgcagtgacgtgcacactcaaccttttacaaggcaatcacagattgcaagctccatanggctgtggaaaagtcctctccactctggagtgacagagacacaatttcggctcattacgactgaaacagcagacagctattcactcttagatggtccagatcttggataaaacttcacttaaattgagatgaaaagtccagcatcgcaatgcagaatcctgactttgtgttgtcctgagctgtcagtaagattgtctacaaacctcctgtcagtaaacagcatagttcccacactgatgag

SEQ ID NO: 613 - DNA, 323 bp, Rattus norvegicus
tttttttttttttttttgttctcctaatagccagattcttttatttgatgatccatacattttaattcaaatagacaccacaaaacttaggcacagattaagcattttacaagcaatgcattatgccaattttctttgcaattgccaaagagtacaataagtgaactccttaaatgatatacttctgtacataaaatatccatgtattaatacaagtgtatggagcagagtttaaaggtaatcaaaccctaggattgaaataaataggatgtgtccatacagagcagcatatcccagaacactgtgcttggaagtggtcacgg

SEQ ID NO: 614 - DNA, 375 bp, Rattus norvegicus
tttttttttttttttttaaaaaaatatctcttgcaggtaaagcaggtgctgtcctccaaacacttgcaaaatatgaggcaaggaggattcaggtgcctgcacgcaagtcccaattgcaaggattaaagacttgcaacaggttgggggtgaaaaaaaaagaggcgcgccaggtgcacgcagtgagtggagacccaggcgggatcggggcagaattggaggggtgatgaagagaaacacagaatcgctcaccccaaagctacagaaataatgatcttggaggccttgaaacggggagaggtgaaggaaaaaaaatggatttggcttaattttttttttttttttgcctttgcttaaaacctaaaacgcacccccact

SEQ ID NO: 615 - DNA, 394 bp, Rattus norvegicus
  misc_feature (1)..(394): n = a or c or g or t
tttttttttttttttttcaataaacaaaactttattttcctttaatacaaaaattaaatagcaagttttttaatacagtgataaattagaaatttacagtacagacatcaatgtagacacacttttgtacatccttaaaaagggggatatatttccttggaaattcagcaatttgttcagggcatggatagcaggggtttgccaggtacctctacactaagcatccgaatggccccaggttgcctccagggttctgcagttactgaaaggcatgaggatccacgtaaaaggcanagagcaactgggtaaactgctgcacaaaagacttctaactgtattttatcggcttgcagactgggattattattttagttcatccttcttatgaagagcc

SEQ ID NO: 616 - DNA, 351 bp, Rattus norvegicus
tttttttttttttttttgcatcaccatgatttattagacaggaatcagcttttcaacacatcatgctcaccatgccccaccccacagaaaggcttcaggagtcaggggaggaagggatgggttgcccacacaggtcccaaccgaagatctgagcaaccagcacacctaatgcccaggaatctgagcttgagtgtattctgccactccccaaacgatccctacaggggaagaccaaacaaatagtcgatagataatcaaggctggctttccttcccctgggaactcggacagcctcggactagacaacatggattgtgccttaggtagccctggcgactcaggcaagaatgg

SEQ ID NO: 617 - DNA, 491 bp, Rattus norvegicus
tttttttttttttttttcaggattcctgcagctttattgacactcatgccagagctaccaagaggtttccagcagccacagcacaaaggccctgcagagtccccatccaataggcctcttctgtggagaccttgtcctcaccctgacccttgacttccatcatcacttgctcctgtgacctgggttccggtcgcccgtcatccgatggtctcaacaggacttcaaagcatgtctaccagtttgaaggttccctccggtttggcaggaaccacgtggacaaaagtcttgtagagcacagcacccttgggcagactagtgaccagattcacagcctccgagtttttgggattgggcacgtagacttctttcgtgtagcgaactatcccctcctccagggcatacaggcacttgttcttccccagtcccacatgggcgcctgggtgccatctgaactgccgctgagtgccaaggatgttgccggcatgaacgta

SEQ ID NO: 618 - DNA, 528 bp, Rattus norvegicus
tttttttttttttttctcttcaagttttattgtgcctcttgcatggtgcagatagttttacagttcttttactataggaactgagctgtgatccaaacaatcaatgaacttattccaacctcagtaaatattcataaccatggaagatggcatagcacttagcctacagcgatgacagcatagacctgggcaggttttcagttatgtccagaagatcatcccaagtgattactgaaagccaacattaaacaaaaagcaacttgtttaaaattcctgattcagtatgaaactctgaaatcctccaaatgttgtaattcccactaaggcatgggatgtattcggaaagaggaacattaaaccgtcttaacacctagtaacaattttgcccttcaccccagccttcaaaaccaaacttgattttaagttttccaatacatcctatcaaaggtttgtaccctaatgaggtggcttatttcaacacacacccgggcttctggtgcaagtcactgggtccactataaagagtgc

SEQ ID NO: 619 - DNA, 394 bp, Rattus norvegicus
tttttttttttttttttacaataaaaataaatctttaaatgttttccagcttatttccctgttcctccgccttccccatgaggtactacttactatgcaagtcagtcaggtctgaaattctgaaattaaagttcaacatggtaaagacaaggaaggcgctctaccctcttgacctccagagactccacagagatagcaacagtaaaggcagcagagactgcctgggtcagactgtaagcagggagaagttgggaggaacagaaaggcagtaagaatgataggaaagaccactgatagactgcaccctgacttcttggagaggtcatggcctcacagttccaccagactgggaggcctggaacggcgagctcatctttttccagtcactagaaga

SEQ ID NO: 620 - DNA, 255 bp, Rattus norvegicus
tttttttttttttttttaacttacaaataagtgtttattagcccaagttgccttcctttttgttggattcataggcatcacagacgacctaaggcatgacacactacatgtttgttgttttgtcaagaggccctgccaactgtcagtgctgggctacatgaaggaccctggtcaagtggcaagattctaatcacgtggtttttttttttttttcaagtacctgccaagttgctgtgcaacccaagatcacaaagt

SEQ ID NO: 621 - DNA, 357 bp, Rattus norvegicus
tttttttttttttttttagcggcagagacgtttattggaatttttggccggaggttgttcatctgaggtgtggcttttcaatgaagccatctcaagtccaaacaggagtttaggaggcagagacttgattaatccactatactgcttgaccccatcccccacacaaggaaagtgtagtgcctagccatttcttgccagtgattacggataataacgtaataataataataatgataaaaaacaaaaacaaaaaaccccaaccccccacaaagcctctgttctgaccacccttcagtcttctgctggatcagaaacgtccaaactgtttaagtacatatgcagttttgttttagctca

SEQ ID NO: 622 - DNA, 447 bp, Rattus norvegicus
tttttttttttttttttaagactgtgtcatatttttattttaagctataaaaacaaaattaggcaaacaaaacaacagaaaaactcaaaataggttcaaatgatgtatattcatcttttccaggaaagcagaaggtaggccctaccacaaagaaaagatgtcattaatggaggttaactttcaacgtacattaaatactatcaattaacgtctgaagagaacctagggtttgttcaccttgctataagcatgagttgacttttgttatgtcattgaaaacataaaaatgccttaaaaatctcagctattaagtatgatcttactggaaattcttaaccacaattttccttcctggaatgatgtcgtgcctgtgcatccctctaaacataacggaaagcacagctaatgcaggcgggcttcaacctgttctaccagctgaaacagctt

SEQ ID NO: 623 - DNA, 451 bp, Rattus norvegicus
tttttttttttttttgtattcaaactagctgcttttctaatctaatcaggttaatttcaatacaaaaaaataaaaaataaaaaataaaaggtgccacctggtcagcaacatcatacactggtgacaagagcaggtttactgagttgtgagctcagactgctggaccttcaggctggccttgtccacctcggtagactgaggataaaagggacctaccagccagttgagaggcgtgttgttaacaaggtaatccataacttcatctaaggactccttcattttctgcagctgccccttgctagaagtgaggacgccatcagacacttccttgaaggaggtaacattgcggaacgccgagtagatgtcacctgccatcacccccaagtgtttggcctggtcttgaatgttctgtggtaacccttggacgttgaacaggaacgtctggcatgta

SEQ ID NO: 624 - DNA, 304 bp, Rattus norvegicus
tttttttttttttatttcatttggctaccttttattcattttattttaacttttcctgattctatcttgaacccaaaaaaccctacccttaaggcaacaagagaaatgttctgaaaacaaaacaaaacaagaaaacctactctttttgatttccactctcacattaaataacaataaacccagtaacccccaattatgcagttgtgaagtcctaagaaaccagagtttaaaactccgtccggagcacaccacacagggtgggttaagttccctaacaagaataccagtgacccacaaagagcaa

SEQ ID NO: 625 - DNA, 457 bp, Rattus norvegicus
tttttttttttttttttaatggtaaatgtttgcatttatttttaaaagcttagtttttactaagcttttttcttaaacaaaagctaataagcaagaattatttttccatacagaaactttatccataaacaagacttaaatttattccaacattgaaagctaaaaaagaactggaaaaattacaaagcaaaacatttgagtcagccttttttctaccatttgaaaatactgtacttagaatggcagacacatactgaaggagacagaaaaacatgcatttagtctacagatcagcattaagagtgacatgcaattcatgatttcctttcaattaattatttaactgaaccacttaaacaaagggtttggtttggtttccacttgacgaagatgatctgttttctgaattgatcttcttttcctactagatacaaagtgtgtgagctctgtcttctct

SEQ ID NO: 626 - DNA, 225 bp, Rattus norvegicus
tttttttttttttttttagagagcacacagtttattaaagagaactcatcaacagcactagcctgctgagctcctgggagctgctcccaactgagccgcaggcactcaggctctgactcctccttcagaatcaagggcagatcctttcctcagacagcacccatctgtggagccaccctacccaagacagtctccatgtccttggccttcatctcaaggacaagt

SEQ ID NO: 627 - DNA, 498 bp, Rattus norvegicus
  misc_feature (1)..(498): n = a or c or g or t
tttttttttttttttttaattttagtatttattgccatcaaaattagcgatttagggcttacacagaaaaatctgccaccatacaatctttcaaaggaaagctgtcttctctatgtgtgagaaagctttaacttattcctgttctaacataaaccatgtttaacaaacagatgcttgaacatgtgccggaatttagattaggcaaggaagttcactccacctagcaagcaagtctgaaatatcatctttgttttttaaaagtttgacctgaattactgaaatctaatggattctcatggtcagtcatatgaatacgttataatcagtaagaagtcagtattgcacattaagcttggaccaactcaagtttcttttttatgagttctttgccatatgtgttttgtgaaaagcctttttcatctagacagtattgcaaagatgtcatagtttatttgtctccacagttttatctacaggagcattgcacgttgcccgtan

SEQ ID NO: 628 - DNA, 431 bp, Rattus norvegicus
tttttttttttttttttagtttttgaaaccagtttatagatggaaaagaaatgacgatggtcatatgtgttgatacattctccaatcccctcatggggaagaaagggacccagagccattactatggtaagtgtacaggacccattccagggtgggaacacccttggacttgacagctcagcctcaaactgggaatagcacgctctaacaataccacactctgcagtcagcttacagtaaggggggaatagattcttccccacgtgtacacaggcaaacctggcacagtgatagagatgtgctttagagagagaaaagtacatcgcaggtgttaataacattgacaaaagttgtagccaagcacatccaaacgcctgtccagcttgaaaatgcctctcagccgtctccaaacagactccggcaagcagact

SEQ ID NO: 629 - DNA, 441 bp, Rattus norvegicus
tttttttttttttttttgggaacatgggaagtattgttggggaacaggcagaggctggaagagtccaaagaggggtaacccaggggaccaagccctcccgctccacacccccatcccacccccaacctcagcctctcttcatggtgcttttcacaggatatgagcatcatgaccccaggcaggggcagaccttctacagctgaccctggcttggagctcactttgtcaggaatctcctccattctcaggcgagccccctgggatgaaggagctgagggaggtgctagagtcaggccagtgggcctttcagctgccctgctccagagttcccagcgaagtcagccccagctcgttccagagcatggtgacaatctgtggagcctgcttctcacctgccctgggagttcagtgtaccaaggatgatgaagttactgttgctaa

SEQ ID NO: 630 - DNA, 474 bp, Rattus norvegicus
  misc_feature (1)..(474): n = a or c or g or t
tttttttttttttttgtacacagatgcttttatttggatgttaatagatttcaacattgtctgcaagattctcttacaatgcaaagtttttttttatatattaaaaaactcaatttagtcagtgtaattgctgtattaatgtgaaaaccttacaacagaatgcagtattggtatgtgtgaagtcagtttccatgcacggatggctgctacctgtatgcttggcatcttcagaaaactgaagaatataagtgaacagtaaaaaaagatgacttaagatgcctaacatgtttatgattacaaatcttgcaaaaagcaacaaagcagttaactggaggattcaaccaataccaacccaaatatgtcctatgtcccataagcccaggcttatggacaatgtattaacatttgtgctaacttaatgctcaagaaaaattatgttttaaaatatgtancgtgtctgagatattttacttt

SEQ ID NO: 631 - DNA, 407 bp, Rattus norvegicus
tttttttttttttttttcttgccaaacatagaactttattatatttctagttgcgtccctttgtattagattcagaatcaagtactggacagaatagctctgaactatgtccttgggctaataaggtttctactccacctgataaactggcttctatccccaccatggtgccagttggaggcacttggattacagagaaacagcagctggcttgaagaggggttttagtctaaaatctcccagtaggaacacagaacagattgaacttgtgttggggaggaaggttgctacataccagagtacgtttcagtttctcaaaccagaggggcacccaaggcactttccctgtccccactcatcccacaatccaccttacttgctgacctccacctctgtgtgtcaaagca

SEQ ID NO: 632 - DNA, 458 bp, Rattus norvegicus
tttttttttttttttttagtattgcacacgggttgtttattaagtatttagccacacagaggacaagttaacagccagagatatcatctgaaggcaagaaagaccaaaaaccaccctagaaaatatttctataagccttttctaccacctacggctttatgaacactgagacatcttattatcaacaaaaatcacggccacacaaagaacagaagctagagccactggtgttaatttccacacagattaatactttccctggataatgcagaaagtatttcttcattgagaagtcactgaaaagtcaatcagcagtttctggttaattttggagacacacatgacgccacatacaagcatgatttcacgaagacggaggggtggttatttttctcttcccagttttcggaaaaactttttttcaactttgggtctctgaagcggctctgcttttactc

SEQ ID NO: 633 - DNA, 372 bp, Rattus norvegicus
  misc_feature (1)..(372): n = a or c or g or t
tttttttttttttttatgtgctcataggctgtttattatcaagaggaaggagagagaggaggagagagcccagacagccctcagggcccaagggagagtgaacagaaaggctcctcttcctcctcttgccactgacccagaagactccatctgcagagatctcagggtggcttaggggcctccaggaggcgtggcagctctgctgttgactggagatgggatggatccccacagggtcaggtcccagcctcggaatggcttctgtgtacacaaaatatctctcttcgaaaggcactggtggaggtgagcagtangaaggctgccccatcacaagccagactcactgtcccaggtctgagttctgcttcctca

SEQ ID NO: 634 - DNA, 388 bp, Rattus norvegicus
tttttttttttttttttgagactgggtacccgcattgttctgaggaggatctgttctttagtgtactggaaacacgaggttaccagcaggcacaacagggaccctttggaacccttacaaaccagaagggtcacataaatgtactgcatgtgaggtggtgagggaaagggacaaggggaaggggttaagaagagaaatctctggtccactgtgactttcttcagcctggacagttgctcttaaaggggtagctttcttccagtgtactgtactcttcagagcagcagacggctgcagggtgtgcagccagcagcagacgtatcagaaagagtaagtcctaaccccttggttagaaaaacaggagacagaagttttaacacccacctta

SEQ ID NO: 635 - DNA, 463 bp, Rattus norvegicus
cggccgccaagctcaccactgtctgcgcgcacactgccacttgcgccggcagcagggagcccggcgcgtcgccgtcgccccagtcgggttcgcgcttcagcgggcccctggcgattgaccccacacccgggggtcgcgtagggccgccctgcagcagctccaggctgcccgcgccggccgctttgtgattgctgttgaagaggtcggcgaagatctcgtcgtggcacaactctagggtgggcacggcagccatggaatcaatgtaggcgctgaagtcgatggcgctctcgtcgtcatacatggcaggggtcgtggagcccggctcccccagatccccaggctccggccctcgtcctggcttgcccaccctgcctggctcgtacaatgccgcgggctctgtgggccagggtgcgccgcgtgctgggctgtctaggctgaaaagagcggcgctcatggcggcgtc

SEQ ID NO: 636 - DNA, 495 bp, Rattus norvegicus
tttttttttttttttttgcattcaaattttattcatcagaaagacatgattatttcaagtcagaataagggacattattcaagttttgttccaactcggcacaccagctgtgtattcctatggtatccactctcttcagccttcctggtggccacgagggtgggtggtcaggcaaggcagggctgcagtcaccagcaggatacacacattccacaattctgtaccataagggtggtccacgtagcaagagtagggttgtgtgcccagaggatcagtcgtcgcaggcgggtcagccctgagtcttgaccagactggactggaaaatggccactgaggtcagccaataaccggagtgtcaacaaactctactgttcatagctctagggtcccattactgcagggtgacgactccagttctagcactgtgatgttgtttggggctgaagtggtcaggatgttccttggcacaaacaaggtcatttgtgggccctttgt

SEQ ID NO: 637 - DNA, 461 bp, Rattus norvegicus
tttttttttttttttttccagaaaatgaatgattgcatttaatataagaagcattgacctgaatttaaatgggacagatgcggaaggggcggagccatgcttcaaaccctgacgaggcttgttgtggttccaatcaattttccagccacatccgggtcagtccccctatgagcccacagcggtcacttttgaggtagatgctgatggcttaaagagaggtaggtaaagtccgaacttgttttcaatgcccgcaaatgttgcaactgccagtttatagccccctacgtggtcaggattgggagcgggcagagtaatccgagatttaggaaccagctcagatcccacgggcttcacgcctccaaaatcgacgtagaaccatcgctgcagcagttcgtaagtaagcaaggtgacaccaaactgcggtgaggagcggaagactcgagcaccagctcctttccaca

SEQ ID NO: 638 - DNA, 494 bp, Rattus norvegicus
  misc_feature (1)..(494): n = a or c or g or t
tttttttttttttttttatacacatttttaatgagcatatattagtctagtaagcagaaaaatacaaataacaaatcatgattagtaaaatgtttctcataattactttaaaatttcttagaatgatgttatcactgatttatccaatcttattcatacaaggtatgaagtaacccataagtttgctaacagcataattgagagtttttgcttggtcataacttcctttctaagttgctacttggcatgaaaccccatggattggaaccaaacaatggagccaggcacagaatagatggaatcaacaggaggaaagacaccttccccttcaatgggattgtctaccccgtagaccaatgacccttgagtctgattttctgacttccattttgccatctgaagaatagcaatggaaccaaggtgctcaccagggaagaagggggagcaagtanagtgggggtgggtggagaacagagtctctactggttctatca

SEQ ID NO: 639 - DNA, 364 bp, Rattus norvegicus
tttttttttttttttttaaagtctgtctctcgcactttagtgtcatattagaataatatcaaatgttccgttgggagccttatgtttgaagccttaagataactgtgcttttccaggcccactgccaccagacctataatcccagctactcaggaggctgagacaggaggatccccgttcaaagatggctgcctgggctacagagtgagttccaggccatctcaggcaactcagtgagatcctatcacgaaataaaaaaccaaaaggggactggggacagagttccattacagtaagcttgcctaccactgctggtctggggaggttctaggttcagaccccagtgccaaacacactcacaaag

SEQ ID NO: 640 - DNA, 400 bp, Rattus norvegicus
  misc_feature (1)..(400): n = a or c or g or t
tttttttttttttttttgaaaatccaaaatgttttattttattttttttccttaaatagagataaccagtaaacaattttctgaacttggaagtttaaaaacgtgcatataaaaatgggcattatgtatttcttattgaatgtggattgactgccgtctgctaagaaaagtgggtgtgggggctgaagagaaaggaagttgtctttttttgttttttgtttttttttgttttttgtttttttttttttttaaggcttgcttgtgaaaggaacagttgtaaaaacaaaattgcttgaagcagggtcagcttagtgcttcacagtttgactgcttctctaagaggagcccttcctgcacacgtgcatcagaaaccacagaanacacanagacagacacctaa

SEQ ID NO: 641 - DNA, 353 bp, Rattus norvegicus
tttttttttttttttttgaggaaagaacatgcatctatcaagaagctatactaataaaatctcggaggacacctcattaggaatgtttctctttactgctgagacagatgggttatttaattactcagtgtggacatctgcttagctacctgatgatgggagtaacagactgctttagaatagtggccggctctaaagtcccagggagacctgtgtgagatgggcaatgtgtccccatgtcctctccacaactcagacaagcttgttcttaagcggcaggcacatcagcatgatgcagtaaaaggacaaaggatttgtagaacagcccatggcacgcgcactttagtcaccta

SEQ ID NO: 642 - DNA, 492 bp, Rattus norvegicus
tttttttttttttttttgaagaaaaaaaaagaacttttatttttttctattgcataaataatggtaaattagactctttttttttaaataagattatatatttacagacaagtttagttacagaaaacatcgggtacatatatggcaaccattttccctttatacagtaagataacatgttaataatatcgcttcattgggtcacttaagttgcatgccaagttcatgtaggttaatatttacacttgatataaagatatttttctttatttcactaacctgctgtctcaccacttaatagcagaaaatcaccaactaacgctaaatgaggtacaatgggaaattgagatgcatgattgacatccgactggaacattctggaagaaagaggcaagaagctcctgattagaacagtctttacctgtgcttcagagtcaccctgtgcgtagggtttaaatcccagacatttacatctgtgctttgagaataagt

SEQ ID NO: 643 - DNA, 153 bp, Rattus norvegicus
tttttttttttttttttccaaaaatagagaactttattgtggggccacatgaaaagggctggggtaggggatgtggggccagcccccgaggcctggggatgaggaaaaagttaatacacagtacatatagaaggcacaagtggggaattggag

SEQ ID NO: 644 - DNA, 467 bp, Rattus norvegicus
tttttttttttttttttgaagattgctttgtactttatttacaatagaatgtaagaaaaagtaagttattaacaataataaataacaaggggggggcgggcatcgacgacagaacagccgtaaaaggacacagagggttgtgtgtgtgagggtcacttccgttcgagttgcttgcactctgcgttccaacacttggtccttcagtggtggcagtggtattttgactaagttaacccgatcaagatctcagctcgaaaacggaaatgctgaaatgacactggcaaggacatataacatcaactcaaaagaacctcttatctcctcagggacactgggaaacggggagggagacttgaaattccacagatacagtttgaactcggaaagcaagaaagtgggaaggcttatcctaagcatttattaaaatggagttacagtaaaggggcgtcgtctgttaagttctccac

SEQ ID NO: 645 - DNA, 466 bp, Rattus norvegicus
tttttttttttttttttagtggatataaacgtcttttattcaattttaggttcagagcttggtttactgtccagctgcacacaaatgtcccttttctcatattgttattggttgtgtatattttctttttgcataagaaatatgtctgtttagtccagtggctcctgttttatccggatgacggagggtactcggggtgtccgtctcagttcccgtcggaggacgtattcactgaactgggatgagtccacgcctcctccacaggaacccacaatttcaaatcctctttgctgcaaccgctcgaggacctgaactgagttgaggtggcagtagccgtttagtggaaacctgatgacatgcgtcgagtcgtgattccaacctgcattgacggagttgcacatcacgtcgccgatctcgggaaacacttcttctatcaaggacttgtccccactgagcgtgatccttt

SEQ ID NO: 646 - DNA, 314 bp, Rattus norvegicus
tttttttttttttttttaacttggagattaccaaagatttatttggaatgacacagcactgagaacacaactgttacagatggtttgtggtacagcatacatcacctcgttcattttagaatgatctgtgaagatgagttgcataaatagaatgtgaaagtatataggagcttttgtaaataggttctttagccccctcatacagccaatcatataaaggcagaaatgatgactgcatagttgctggtccatggatttactggactgagcaactgggcaactatacaaccaagccctgctctctccaaaggggc

SEQ ID NO: 647 - DNA, 359 bp, Rattus norvegicus
tttttttttttttttttaaagaacgacttaaaatccagaagaatcctaaagccagcgaggagtagcttcaccagtggaagggaaaagcttcactaagtatctcccaggaacagcactgcagaccagggcagatctcgggtccacttggacagtattaattggatggtcgagggaaagtacttttcagttcccatctgcaaactgatgacaccgatcttctgggaccgggagcggcgccgagacctccgggaagggagcgctagcagctcccgcgccgccaaactcgctccgccgctgcgcgcgcccgcctgcactccttgtcgggtccccgccacgcctcgcgtgccctcctcgtgccg

SEQ ID NO: 648 - DNA, 423 bp, Rattus norvegicus
tttttttttttttttttactatttatagcaatctattagatttaatagaaggtacatttgatctaacagtaaaagggagacagctgtcagtaaaatgcttgctaggcaagcatggtgacccaaacttaatccccagagacaagaaaaaaaaacaaaacaaaacaactaaccaaacaaccaacaaaacaaacaagcaaacaaaaaagaaaagaaaaccagatgtggtggcgctcaacatgtaattccagacgtggagaaacagaaagatgtaggtccctggaacttgctggacatccaatctagcctatttggtaagtctaaggtcaatgagaaagcctgtctcaaaaaaaccaaaccaaaccaaaccaaacaaaacaaaacaaaaaacccaaggtggatcacatccaaaataatggtacagca

SEQ ID NO: 649 - DNA, 182 bp, Rattus norvegicus
tttttttttttttttttgaccgagggacaaaagaaaatttttatttaaaatgagcagcctgggcggggcgtgataccgcacgcctcatatgccaaaggctgaggcaggaggattgctgtgagtccgagttgagcttgggctacataatgaagtccaggccagagtggaatgccctcgtgccg

SEQ ID NO: 650 - DNA, 342 bp, Rattus norvegicus
tttttttttttttttttgaaccatctgcaactttattctggagcagaaataagtcattttctaacaataaatataaaaaaaaataataataagttaaggttccaaaaacaaaaacaaaaaccacccaataacacagatctgtaacactgacagcgacagttgtccaaaggggctaaaaacggggtggctgggtggtaagtctcctacaagtcggccaggcctcagcccgggaatgtctgttgcagggtatcctctgtccccagccctggcaaggtccctgccacacactcattctttccacaagtataaaatatatatttaaaaaaaacctcaacacagcca

SEQ ID NO: 651 - DNA, 458 bp, Rattus norvegicus
tttttttttttttttttacttatgcaaagataagtttattaagattaaaaaaataacatccaggacagaaataaccatggaatctgctgggtgtagcctctcctttataatctcagcacttggcctgagtgagttccaggcagccttggctccatagagaattccagcctagcatttgctaaaaactaaaacccaagccaattaaacaaaagccatcagctacaaacaaaatgacaaccattttctggagtaacaaggttaattaccatcatttagtgtggttccaaattattggccaaatgcaccacctgaaccaacatcaagaagcaccatactttaattatagttagtgccaaaagaatgtttgagttttcctaataccaggggtcatttataaccattttaacttttttttttttttttttttgcaagcacacacgtattggtacccatgtcac

SEQ ID NO: 652 - DNA, 501 bp, Rattus norvegicus
tttttttttttttttttcaatgcatttgccatttttatttcgcgatgcggtgacatcattcacgacgggctgtgatgcagttgacagtgtagtggacaatatatctttctggaggctatttataactgaacactaaatattttaattacagtggaaattctgtacaatttaaggcttggttctgaactagattgtaagtatggaccagatttgtaaataaaacacctttttgttcaagtaaaaatgaggaagaaaaatcaatgaaaaagaaaaaagaacagaaagtaaaggtagccagacaggtattccctggagtgaattttcataatattataaactaacaaaaaatatgtattttcttcccacacaaatgataatttacattattgagggtttgcttaggtaattctgggaatctttctgggtcgaatagagaccagagcaagtgtggaagaagaaaccacatcagtgtgctaaaaccaatgctaccttacagcaaat

SEQ ID NO: 653 - DNA, 455 bp, Rattus norvegicus
tttttttttttttttttacaattttaggcaatttttatttgtattttagtatctaaacaacttgcagggaatacccttgtggagcaacagagtggttttatttgaagctatttgaaagtcacgacaggctcactactatgttctcaaaagcagtcaatatgtcagccagaacagccaacttctcaatagtcatctgtgatagatacttgactatgtgagcctagagagcctccccacctctggtccccctggagaggaaggggtgtttgtgtgcttttctgtgttggttccactgaattcatcacgatggagatggacatttgaaattcataacggtctaacatctgagcaatcttctttcgagacacgccatgtttattcctcttttctaattcttcagggtcaaacttccaccaagtttccggttcatgaaactctactctgtatccttttcc

SEQ ID NO: 654 - DNA, 402 bp, Rattus norvegicus
tttttttttttttttctccatttatttttattcctcagagaattacagaagcttgttttacagcctctgtgttgacacagagtcaaggcacagtgttcactcagctacatgcaccatcagcactgtgccactaggagaccagactggtaacaagcttgagcatcgctcgcctgcctggagtgccagggcccctctgctcagatggctctgtaggagtgcttcaaagctggtcttacaaccagaggcaccgcacctccggagatccctgtttgcaatctacaaagtataggcatgtgatataaacctgttccccagaagcttcctgggtgacttacatgaacaacgggactctcaacaactgatgtggagcactgccatttcctgatggagctgcatgtctga

SEQ ID NO: 655 - DNA, 346 bp, Rattus norvegicus
tttttttttttttttttcccaaaacatatatttacctttccactcggtacacccttgagcacctttgccagaacatccctggcgtggcccagcttggcaagggccaatccataggctttccgtgtggctatcttgtcccccactttgtatttgggtggggtaggcattcggatgttggcaatgtccacggaaggggcatcctcctgagggggcgtggcgaggatcttctttttgctctgaacctggctgtaaatctcctggataatctgctcagccatgtttttggggaggggcttcccatgccacgcctccttgtcttcaatccctgtgatcccgcggcccttga

SEQ ID NO: 656 - DNA, 324 bp, Rattus norvegicus
tttttttttttttttttaaagtaattacattttattgagtctttaaaaataaaacaacaaccgcctcaaatgctttaagaggctgtttgcacacaaaccccaaaaccaccttagagaatatgaaattgagtagtgtaccgataacttggatcctgctgctgtagtctgtctttgaaagttgcttcagtgctacaagcacttgtataacagggtattggtccatcctggacatggagttcagctactctcaccatcactgctgatgataccacgcatatgagaccagtctggaggtgcttgacgtggccgctcctcatctgagtc

SEQ ID NO: 657 - DNA, 477 bp, Rattus norvegicus
tttttttttttttttttatttggagtctgtttactggaagctttctgtccctgaggatctggacaacagcagcaggcagcagatgtcttattaattcgttgaaggcttggcccactcgacattgaggataagatggtcgtagccaaagccagacacccctgcaatggcacgcgcagcatcctcccggcggtgaaagctgataaaggcaaaacccttggactgcccagtggtcttgtccttggccaagtagattcgggagatggagccaaaaggccggaagagttcctgtaagtcagtctcacgagtgtcctcagacagattagtgacacggatggtggcattgtcatcagctctgcggtttggctgcatagactccccacggcggcttgccccatcccggagactaggaggcacatacttccctgtcttgttctgggcggcctgcacaggctccagttctcctggcaatttctcctt

SEQ ID NO: 658 - DNA, 529 bp, Rattus norvegicus
tttttttttttttttttggcattttattggtttttattcatgaagtagagcttttacttcatcccagcgttttcctcagaggtagactttgatttgatttcaatgagttcttcgactcgagccaggacactttcaatcaagtcgaatgtgaagagggcggaatgtaagaccttaagctgcatctcaggaggcatagtggggatttcttctccgcctacagtcacagaacaaacacttttacacattgaggcagcttggctattttgttggctgtttttaatctctgcttcataatgtgcctttgacatattaagtcctacatgaagtggctgtagaaagttattttcaatctttccaagctctgtccataatccagtttggttgtcatcttcattatctttgataaccaaatacctcaacaaatttagtgaagccataatccggtctgagttctgcagtaaatctgtctcagcgccctcagggagggacaggaccaggtctaacagagaggtcagctgtgcgcctgcaa

SEQ ID NO: 659 - DNA, 306 bp, Rattus norvegicus
tttttttttttttttttagctccagaggtttattagccactcattagggacctttaattgttttttcctcctcagcactcctcaatgactgtcgttccaatcagagagtacagttttttcttaacaagtcgaaatcccgagctgaggatcagagttcgcctaaggcccgacgagaagcgacctccgctaaagaagaagtccttgaggctggtccaggagcagctctcctgcttgaacaccagcgtgagctcaaaggtcggcaccacactagcatcacacacaatcctatccagcttcctcgtgccg

SEQ ID NO: 660 - DNA, 372 bp, Rattus norvegicus
tttttttttttttttttggtctttttttcggagctggggaccaaacccagggccttgtgcttcctaggcaagcgctctaccactgagctaaatccccagccccaactctttaattcttatcacctagcacaactagtaaatagttaacacacaggcaatacacagctattatccaaagtgagaagactgcactgttaaggttgttagagagagttttcttttgttgaactttctttttgttttttacataaggtcttagtttgagcccagcttagctcggaactcacgatgtagtccagactggccttgaaattacagcaatcctcaagcgtcagccttctgaatgctggaattcagataaacctcgtgccg

SEQ ID NO: 661 - DNA, 545 bp, Rattus norvegicus
tttttttttttttttttgttattccataccagtttattttagataatgtgcttcaaaaacgttttatcataaataacctttcacatcataaaataacttagtacgatttataataaaacttctgagaatttaacatctcatcaaaatacattaaactgtggcttgaaaatatgattaacccttttcacttttcttttatttgagggcatgaagaccaaaaaaaatacccaaaatattgctacacatttaaagtttcaacaaagcaatatttggtttactttactgtaacccggccatcctaaattaatagttttctttcttgcacagttctttgtagtttttttgtcccttttgacttggatttctgtttccacacagcttcctccttcagtctcacctctctctccttctgcaaagtcatctcctagccctcctgtagttgaactcagccccttgacatcagtttctgtaatccttgcatcagcgtggggagtgactgcttgagtaactacaaaggtatttcaaaacttcagtgcaatttggtt

SEQ ID NO: 662 - DNA, 417 bp, Rattus norvegicus
tttttttttttttttttctcattttggtttcgtttttaatgcattttgtcagttttcttcatttttaagtcacaaacagcaggcactgaacagcagttccccccgctgctgccggcagtcaggccccgaggttacttgaggttctaggcagatgcaacagctagggaggccccagccacaggcagcttaggagaagtgtgctgcagatggaaggtgttccgggaatccaaggacgggggcgccggggacaagcacagcttgctcccacccccaaaccaggcgcctcctaaacttccctgtctggactcttggagcagccctcactgtggccagccggcatgcagggtagtcctccagccacccttgggagcccaagttcttttccaagaccccctacttgtccctttgcctgctcca

SEQ ID NO: 663 - DNA, 332 bp, Rattus norvegicus
tttttttttttttttttaacgtttcctaatgtctgctttctttgcaactgtgagtggcgatggtcgccagctcagaccaaggcgactgtgcaaacctctgaacgaggttttcctttctgacagaagttggtctatcggggttctttctcaacagacatgatttctagaaacacagcagccatcttgtgactacgaagcaaggagcaatgagattactgagaggaggccccgccctcactgagcattgatacggcactccgttagatataatactgtgttagtcacctgctccaaggttcaggctatgcggataacaagccctcgtgccgaat

SEQ ID NO: 664 - DNA, 352 bp, Rattus norvegicus
tttttttttttttttttaaatactttagttcatatttcattgatttgaccttttgactcaggatcagagaatgaatccagcatgaaaacaagatgaaatgaaataaaacaacaaaaatccccagaaaacagaaacaaactatttaccattgaaatggcatttccctgtcggctaacttccattagtttttattgcatcatttttgaaatgccaagagagtggctttggacgtagtgtttgctgttcaactaaaccatagtgttcaattgcttgcgaccattagctaaacaccattttctgatgaactccctcaagagagaatgtataccttctaaaatgtgtctagcacata

SEQ ID NO: 665 - DNA, 523 bp, Rattus norvegicus
tttttttttttttttttatatgtgactttttaataaaagtttctgccatcatattattcacatccaggtttccacaggtctggactcttcttcctacagatggagatgagactacttcattgaaaaaccagaacgagacaaaacctgagcacagtcaggttgtcttaggcttaagagtttctgggtttcgtccttggaggagttgaggatcttcccaaggcctcggaccacgaatattcttccagttttcaaaagtggagtcctttattttctcatactctgactctaaagttattttattcactttcaattttttctccaattcaggatcaatcttaattgtcacagcatcatatcggatttgtgaaaattcgcgaagaccaaaagaaccaccaacaaccagcaacaacatgggaactccatagcgaagggtcttgttcttacgcagagcgcgcaacacagcgggcgcaaccatggcagaaactgcggccgatttagccgcctccgcagagaccccaacgcc

SEQ ID NO: 666 - DNA, 447 bp, Rattus norvegicus
tttttttttttttttttggcgagaaggggaagaggaggtggcctacattcagaaatgtcttagaataggcattaaaaaaacataaataatcataaaccaaaatacattaaaataaaattacagtacataaattgctcctacaaggtccattacgttaggtgatccttccaaaggttcataaatagtcatcttgactcaaaatcgcttcctgcactgtgatgaagcttacgcagaaaaaactacgaggaactgcaagcgcgcgttatccgtagggtgatgtccaaactacttgatctggcacagggcggggagactccgttggttttgatccaagtgaacttaaatagtaatgcactcttcccacttcccgaagtcctcaaaaccttgagtggcccgggtgccgccctcttcaagcagagttggaggtgctgcggagaagccggtggc

SEQ ID NO: 667 - DNA, 496 bp, Rattus norvegicus
tttttttttttttttttaaagaaacggtgattttattttctgagatggtctcagcctctcaagcatttgaaatccaggcacgtagcagattggccggctgagctgtatgaaatttgttaataaacagaaacagggaaagcgttcgtgtgattcaaagtctaagtgtgttttgaaagggttgagctagatgggaagtaagagttctgtgtgtatttctgttccatcacgggggcagctgctaagggtggggctcagctggaattgcttgcccagaatgctcagatccctgcttcccatcaccagcacagcagggctgactagaagtgtgtgcttctgatcccagcaccggagatggggagccaaggagcatcagatccttccatggtcctacattctgaggacaatgatgacccctcacctgctgcttggtgctcttgttgggtttgacggagtagtggatgtccttcatggctctctcgatgaggataacggtgta

SEQ ID NO: 668 - DNA, 286 bp, Rattus norvegicus
tttttttttttttttttagttttgaagattaactttatttaggagtaaagcgctgatacagagacagataatgtgtgggtttttttttaaccttttgtttttaatttttaaatcagtgtggacaatatcatgctgttcattgatacaatacagccctgtcctgggtatacaagtctgtgacatcattcactacatgaatttacttcatgagacggcatagcagaataagactaactaaagatatatattcttagtaagaaaatgcctgaaataaacaaagtcacaa

SEQ ID NO: 669 - DNA, 339 bp, Rattus norvegicus
tttttttttttttttttcttgttctcttctttttccccttttcttctgggattatgtcagaatacaactgaatgagagactggctggatcctgaaaaattttgtccctgtgctgttacagcagggtcttggccacatgggacactgctattggctaccggaggctttcctggtaaaattggtgtgaatggaggcctcagtggagactgctgaaagctggatccagaaagatttccatgtccttgcttaacagaatggaagtttgggctcccaccagaagcagatggtgaatctggaacaaagggggtaggtcctacctgccttcgctcctcgtgccgaa

SEQ ID NO: 670 - DNA, 431 bp, Rattus norvegicus
tttttttttttttttttaaatcattcttttaaaagttcacattgagtgtcgcgatttcaagtatttacaagaggaacaacgtgataggaactggggaagtgtgtgctctggaagagaactgcagcagcggatggtacgagcctgtgcactcagctctgtgcctgcagcgcagctcggcaactttctcggagcctagtgatggtcgccatggacaggcttcctggttctgaaaatattttctgcatgaacgtgtgacactctgtcacaaagtcccctttggtgatctgcttgaacttgtcacagatgtctggaacactgctggcttccaatataaattcctgatgttgcttaattaaggtcagagcaacccggaatatgattttggagccttcgttgaacaaacagtcccagattcgtagcaccgtctccac

SEQ ID NO: 671 - DNA, 306 bp, Rattus norvegicus
tttttttttttttttttgtagatcaattgtggaatttattaaaaaaaaaaataagtattatgcctgggcttcataaaatttatacacgaatatatatacagacacaaataatattaaaataaaaatcacacttggtttcacgtggtggtggccctggcaccccacaaacatatgttaacttttcctttaaagaaattgctcggcccaagaagaccacagttaggtaaccactaataaagctgtagccgttgcctgcaacatttcaattcaggtttcaaaaagatataaataatttaattacaaaaa

SEQ ID NO: 672 - DNA, 452 bp, Rattus norvegicus
tttttttttttttttttgatgcatttgaatctttattctacaacacgagcgacataaatacattatcttttaaaatattttctctttagaatttattttttacttcagataaaatatacacaaaatacacttgcaagcttgctgacagagaccccaagaaaacagtgaaccgacaggttatatcaaaccagttatgctagcacgtttgaaggagaatggtttttaggactttgtaaatgtggctaaatgagccaaaacaaaagtgatgcttccttgatgagccttttggagtaaacaaaaataattcaaggctcctggtgaattggttgcaaggatgaaccttccatcttctaggtaaaatggtaagtctactcattcattatggctatacttagcttcatttatttatactttttaatgaaaataaattcattctttggtataatacaaga

SEQ ID NO: 673 - DNA, 354 bp, Rattus norvegicus
tttttttttttttttttatggagggactggttctttattcaaaatgtcacttgtcactattcagtatcaaaacagttgcactacagggttctctttctccggttggaggagtacaaacaagccaggaatctgcagggcgcccacctaacaggctgagaagaaaccacctgaacatggcaattgggtggggacacttgaaagatcagcacaccactagcccatagactgcaaagaattctcacagccagtgggttggccaaggtaacctaaccccccaaaaacaattttatattattttgaaatttaaaaagttcttttttttttttaaacataagctattcaagcctcgtgccg

SEQ ID NO: 674 - DNA, 472 bp, Rattus norvegicus
tttttttttttttttttacatctcaaatatttttatttctttatagaattacacttcaacaaaatctattgttatacattataccaggacagaaatgggaaatgctaccatgacattaccaggaactgaaagtacccagcacaacaatcttatgcactttgaagcatgttagagaggacgatggcaccattggataatgaactactgaggaaaggagagccctggccaagttacctttggtctcttaaaggctcctgagcactactgagacatgggaactctccattactgagttggtgcagtgtccttctctctagcttcctgatgagatggcatctaaagggtctaaaggttcactcggctcccacaaagagaagggaacacttagctgctgcccctctctataggcacgaccgtgcagcacttcactgcccgctgaactactagcattagaagtactcctcgtgccgaa

SEQ ID NO: 675 - DNA, 555 bp, Rattus norvegicus
  misc_feature (1)..(555): n = a or c or g or t
tttttttttttttttttgttttaatttggactttattgaaacagcaaaaacataactaatgttttgtggattgttttttaaacaaaattgaaatgaaaaacatcacaaataaatgtcattaacatttctggtgagaaatccagtgacaggaaaacataaacaatactgagcaaagtcttctcccacctagactattcaagatactgcctggtcctgggttgggtttagccatgttttctaacaaaggcttctattctgtaaagagaagattggacagcttgtgtagaacattcatggttactattactatatgttctgtggccacatgcacttaacagccacacatgtgcacaaagtcatcattcctattaggcttagctaacaacaagaaaaaagaatacctttccaccttgttctgcaatgtgacaagcgttaagaagagggaaccaatgtatgtgttcagccattccatatagtcattcctttatggcactttccaggagttaattaaaggagcgccaagatctgcangaattcaagccttacctaaaaata

SEQ ID NO: 676 - DNA, 547 bp, Rattus norvegicus
  misc_feature (1)..(547): n = a or c or g or t
tttttttttttttttttaaatttttcagcttgtttgggctttttcttttaataagataacatgataaataaacctgcttctgtacagctatttaatatttcagaaatacgtacatgttacatgccaagaaacgaccctggttttcttgtgagaaacaaggtgagaccataattggaaaaggaaaaccccacaaatgagaaaaaccaacaaagaaaacaagatcaccaatacacaactaactacagttctgtaactacaccgctagccgcgcataacacgagtctcaaaggaggggagtgcggagggacacacttgaaggcaggaggcccctgtcccctcaaactgaatgagaaaaacaaagtcaacaacaagtcaacattgcttaaaccagtggccacacagtaaaaactgtacattgttgtccattcatttaaaagcaaagtcactaggatgattaanaaaaaaaaagtgagaactggtgcctttgaactttctgatgatgaacacttttactcagagtttgacaattatctccactctccctgca

SEQ ID NO: 677 - DNA, 515 bp, Rattus norvegicus
tttttttttttttttttgtgagcacaagggtaaaagcaaagaccaacaatgaatttgcagcatgtggagttcacaatgcttaatgaacaggaacaacttggctcttcagaatgaatcaattaggtgaatgggtaaaaggtaagtaaaacatatggaagtttccctatgcctggtctttcttgaaccagtcatatttacaaattgaaatgtttatgaaacaaggcaactccccatgtggcatgggagacaatgcaggagatagagctcctgctacaacttcctctagtaattaggaagctatgtgtctctgttagaaggatgttaacaagctcctgcagtttccactctagcaagaaatcaaagagacccaaagcagacagctcgcttcagtaaaaggattatgaagtctggttattaaggcacagacagaatgcttgaccacagttctctttctgaagagactttctaaaacaattagcttctagggccagcaggatttgctaactgaagagcaa

SEQ ID NO: 678 - DNA, 498 bp, Rattus norvegicus
tttttttttttttttttaccctaaagcttgcatatttattgaacaaatacgactaaaatagctaaaatacattgggtacttatggaaggaccacatgttacaaaagcctgcgttttcagcagcgtacaactgcaactctacgtaaatgccacaaatgcacaataccgtttccttgctctatttacatagctgatatatctaccctaacagaggtgggggtagggaggatgcacaagaaactcaggccagaggggaagcaagagagaatgagagggacagtgcatgcgtcattggtgtctaacagtcagaagcgcaaacagttcagaacaaggcctgccctgtcaaaggaagagctaaagacgttatataaaaattaaggtgggctttcagtccggctaacacaacaacattccgtgaagagacggcattgtcagattttatttttgtttatccatttcattgggagcaaggacaaaaatgtaaaatctataccttgct

SEQ ID NO: 679 - DNA, 533 bp, Rattus norvegicus
  misc_feature (1)..(533): n = a or c or g or t
tttttttttttttttttaggattctagggtttattggcattaattccttgacatctgtcactcattcacaccttcaacactgaatcagatctgttgggacagatctcatcccaaggatgagagacaagatcaaaccaccatagccaagcaatagtatcttcagagaacattcttcagagatgtggaaagatttgtcagtaccagaaccaagtcacagtggcatgatgttgcttgtctgcaattccagtacttgggaagctgaaacagaaaggctgacaactgcaggacagcctggccctcatgagtaagggccaaaagtaaagcagagaagttaaagagaaatggtttttatacattttatacctgacacattttccaaccttggntcatacttttattgtttatatttgcttcagaacaaggcatatttcagaaattctcactccaagtcacagctgcttctgttacacatatgctgtgttctgacacacatctttttgtgccagagaattttcttacaagtaagaagtcat

SEQ ID NO: 680 - DNA, 316 bp, Rattus norvegicus
tttttttttttttttttctcagtttggtcattttatttttgaacctttgggaatctgcttcataagcctggaactcagcaccataaggttgcaaagcaccatgggtaccgcaagtaaagtcagctgagactccactttggtgcggtccaggttccacagggcattgaagatcctgtgcgactcgctggtgctcctgaggacttgtgtgatgaaggtatcccactgcaacctcagctcttcctgaggatggctcttgtaggccagggagacaggccccatgtagaaatgaaaaaaatccaatgagctcctcgtgccg

SEQ ID NO: 681 - DNA, 244 bp, Rattus norvegicus
tttttttttttttttttccacagtgttgccaatgccatacattctccaggggaaacatacctttgtcaattgaacaactactacgaattcttaatgaaattcattgtcccacatgtgccacaaatatgtcccgatcatggtgacagccaagcccgtccgtcctctgtcacttccagaaaccgtctgtgacactccctgacaaagagaggactctcgctctttcaaaagtcagcattgatttctg

SEQ ID NO: 682 - DNA, 372 bp, Rattus norvegicus
tttttttttttttttttcagaccaaatgatcaattttattcaagcacaaaaatgacagttttcgtttttcttcatctctttgatgaagaaacaccattataagtccaaattggttttggaagcagaggtgcttcttagagaaccccaaagaatacattgctcacagtttttgattttaggattcagctttctttcccacgttattgacactgagggatacctgatgctgttttaatagtgaaagaaggcactaaagaacggggagaggctgagggcaaatgggaggggcaacggatggtgcaaagacccatgacaggtaaaaggagaagcctggagtcctgtatgtgagcacgaaaatgagccctgaagttc

SEQ ID NO: 683 - DNA, 291 bp, Rattus norvegicus
tttttttttttttttttgcactctttatttggttaatctttaatgtcaatattcttaggtccatttcatcttgattgataaagtgaatcacaaagtaatctttcagctgccagaattttagaaacagaggcatggaagacggctgaatatgcacaatttgaacaatgcatgaatctatttaacaccccttctcactatggcagtccaaccctgggctggacgcaggaacttctaatccagaacgtatatcactccttatgatggaacaaccctgacgagttatacggagaa

SEQ ID NO: 684 - DNA, 450 bp, Rattus norvegicus
tttttttttttttttttggcaagttcttttgaagtttattttcaaatagccagtaaaaattgacctgagttcaggatggttatgtaaaaacaaaaaacgtgaactaacagtggtggtgtaaactcatctccgagttcacacactggggaccaagtgcaacggccaggcaagattatacagggaaggagaacaagagtctcagccttcggtgagccaccatgcaaggaaagcaacagagtgtcaaacgggagaagcaacagagtctcagctttcagtgatccaccggtggcccctgagctcctgacttaacagtgcctcaacactgtcgcccaggggagagtccaaacacaaaggaactcaacagtgtcctggtgtttttgtaacacacctcttgctatatcaatatagctctgactgtcctgcaaaagaaataacttcagagggggggca

SEQ ID NO: 685 - DNA, 276 bp, Rattus norvegicus
  misc_feature (1)..(276): n = a or c or g or t
tttttttttttttttttgaaaaatatgtaaatatgtttaatttttttcttagcaaaaaatctttctaaaaataacaatgaaaatttgtctcagtacaaaggctacgtcactattgaaaaaataccagcatgggggaagggcgcgtgagcagtanaaaatgagctgagtcacaatgtctaaagtctgaatgaaaataagtctgcaataaagatctatgccttttttcttttctttttttttctattttttatacaaacagtacaaaccctcgtgccg

SEQ ID NO: 686 - DNA, 419 bp, Rattus norvegicus
tttttttttttttttttgctaaagaaaatgattcttttatttttcagaaaggagaaataaatagtttttgcttccttgcttgtagattcagtagaagcagaattgctcataagcatggattagagtgatatataatcatccctttttgagaggacccatcctctatactcttttcatgcagtgacttctggcataaagcacaacacagacctccatgttaatattcatccaaaaatggaaaatcagggtggccctggaatctagaaccactcatgtaacggatatttttatttaggccatcaaggactttcatgtcttctgaagtcaactgaaattcaaaaacctgcatattctcttttatcctcttctcagtgaaactcttagccaggaccacaaccccacgctccagctgataacga

SEQ ID NO: 687 - DNA, 315 bp, Rattus norvegicus
tttttttttttttttttccagaacagaagggtactctagattagcccacctagttgcacagacaataaaatatcaatcccctgggcagcctggtcgttcttgaagagaggtttgcagaaaaaaacgaaacgaaacgaaacaaaacagggattccttcctcccagggaaacagaagctcagggaggggatggggacctgctcaaggcaagcacagaaatgtctggactccggaatctcatgtgtctccaaatggtctgagaggacctagacccctgaagaggctgacacaggagcagtgcagtgtgagagagagat

SEQ ID NO: 688 - DNA, 443 bp, Rattus norvegicus
  misc_feature (1)..(443): n = a or c or g or t
tttttttttttttttttcggggtnaaatgacttttttattctttgaacactccatacattagtacaatgcatatcgatcatatccatctacctgctcccaattctccctaatgttccactccatctccttcctacctacaggtactccttttatttatttttttgccatcagtaacctccccagtctaattggtactgcccatctgcacatgggtatgtagcatctactggggcataaacaactactgctagaggttaaagaagaacaattctccctgcctcatcagccaacaattgccagtagctccaccagtatgggtgggcctcaggagtttcctcccatcctcactggaattttggccgacttgatcttgtgcaggtagccaaagatattgtaaattgatgccaacacaagtcatgtcatgtctcaaagacatccccta

SEQ ID NO: 689 - DNA, 501 bp, Rattus norvegicus
tttttttttttttttttccattctgtattttattactgaaatacgttgtcttacccaacccacccaaaaataaaaatcttacccttgtcctctaatctttcccttatccccagtcccatccccggccctgcacaagtgccccggatttcctgcccattggctatatcggagtgtgtccattatgtagcaacgtggaagcctctgtggagagcacagagtgggtgaaggacccttaaaaaggtgctcatttgagagccctggccacttgctcataggcagaaaacttggcaaatatgtccagccccgaggtgttggattcggggttcagagcagccaactttgggtacctgggagggcacagcacggcctccaggaactcctcgattttgttggtatctgtgtgcacttcggtgccgtagagcaagaacgggagctgcccaccggggcaaagcttctgtaccgtctctgtccgtctcttggtgtccacggtggtaacgttga

SEQ ID NO: 690 - DNA, 333 bp, Rattus norvegicus
tttttttttttttttttggagtctaaacttttattggtccctcagtccccaaggggttcccttcttctgagccttagtgcctcagaactctggtatcattggtctcggacaccactttgccatccacgaccttacgggtagttgtcctctggacagtttgcatggagttgctggagtccagggcgtcgttgagactgaaatcgtccccatcctccaacaagcggcggtaggtggcaatctccgcctcaagcttgaccttgatgttcaacagggcttcgtattcctgggtctggcgctgtccttctgcccgagtttgtgccagctctgattcca

SEQ ID NO: 691 - DNA, 438 bp, Rattus norvegicus
tttttttttttttttttagtattaaaaaccattttaaataaagttatcacatttgcagtaaaactcacttgtcctgcctcaaaacagaaacacttgaaattaaaacataattttaaaaaaatcatgagcccagaatgggcaggctggaagctggtttcatcctttggaggctccaggagctttaggtccatgttgcatctgtggtccctacagcatggccacctgcaggctccaaagagcagaaaccgcccctgatgggatccccgctagcctcagcaggaagtgtccaagcctcttgtggggagaggagcggactacagagcacctggcagcagggctcagtcatccaggtagtagtccagcttggtgaacacagtcttgcagcccttgtcagagaagaccttctcctccttggggaagaacgcctcgtgccgaatt

SEQ ID NO: 692 - DNA, 281 bp, Rattus norvegicus
ttttttttttttttgttaccaggaaaaaaatttatttaaacccaaaataaaatgacaaaagttaaaaaaaaataaaaattatcaaaaggaaataccaccattggccctaaaacattcaaacggggtcatttttcgggagtcaaaaacatttattaaaaggttatacaggaagcaaaaatacagaagcaacccggctaattaaggaacctgtaaaaggagggtacactaaaatacggtaaaaaccaaaacaggaacacaattttaccaacctgtctaaccaa

SEQ ID NO: 693 - DNA, 498 bp, Rattus norvegicus
tttttttttttttttttcagagctggggaccgaactcagggccttgtgcttgctaggcaagcgctctaccactgagctaaatccccaacctcgtaaaatacatctcatcttatgctttatctactcacatagcttaattaagtttgcagatttgggcatttttttcttttgagtggtgatacccagccaagaaagcatctctggattttccttaggaaaaaggaggggggatacgaactgtgtcttttgccacataatcttcttgtatccacccaccagggtcatctgtcaaagtgagcctgttgtttttaagtttctaacacaattaattctgggtatattctcagaggaacagatgggttggcacaagtctgccctttgagtcatgttcagacacaagcagatgccttatgtcgttcaaatgatgttgcagaattctttgactaatgcaatattgtggagtctttaacagtgttctcttgggtttcctcccacatt

SEQ ID NO: 694 - DNA, 425 bp, Rattus norvegicus
tttttttttttttttttacagagaaggtgcagacattttattctgacttaagagtgaccacaagaacgtccaccttccaaagggccaaataaaaatagacctttacaaattaaaaaaaggtaccatttatgtacacagtgacatcagctaatgctaccatacaaacagacagtatgaacaaacagaaaggaagaagctgcagctggacagacagtcactgaggtccacaggagctgagggcaacactccacatccacacggctgggccaggagggctgtgctggcttctccggaagctttcttgtcaccaaggtccgcatcaaaatgtcacatggctagctgagtcaagctaatgtccgttccagctggaactgcttaacaaagtcacatgcagacatctcataaaataccaaactcccacagca

SEQ ID NO: 695 - DNA, 459 bp, Rattus norvegicus
  misc_feature (1)..(459): n = a or c or g or t
tttttttttttttttttganttccagatgatatttattattgaactaattagtgggaaattgggccaacaaataagacagttttgagctattctgacaacattccccataacgattaaaactttgctcttgaagagtaacgacaggagaattatttcaacatgagtgaataaggaaggtgtatgcctatgtataacacgatctgactacacaaaacatgacacacaggaaccatcaaaggcatctctgtgttatattataatttttcttcacatattgttttcatttctaaattttttacaattagtatatattactctgcaatcaataaaaatagacaaaataaactattgattctatagcatttgatttcaatgttaagtccagatgtataaagactgccacagcagaagctgatcattcatgaggaaaaccataccacatcaaagatgaagactaa

SEQ ID NO: 696 - DNA, 455 bp, Rattus norvegicus
tttttttttttttttttgaagaaaagtcatttattaaatagagtccggttaggatctccttcccgttcatggtgcatggcctccttccagggatgggagtcgggtgcactggaaccccacaggaaactttgaagtatccagttctagggaattatagccaatattctgagagagcaagtctgagatgagagccgagaattgcaagtgttggacaagcagtcaaggaaactcctcacctttggcgaaacctaggcaggatggcaggagcagctattctgcaatggccgctcacctgggacataccactctccttgggcaggatgtgaccccatgttgtcccccagactcctctcctccttgcttctcttcctttcctgtcaagtctcacctccctttctacatctcagttctgtttggtgttgacagaagtttgaatgtcacaatactgcatgtgt

SEQ ID NO: 697 - DNA, 538 bp, Rattus norvegicus
tttatttgtcaacgaaggctacacgggatcacttctggttttgtttttatgctttttccccctttttttctagaaggtatctacatctgcatttatttacagccttgttggtatttacacagtcaagaatacagtgttagaaacacaaaagtattgagaaaaaaacttctcaaaattagttccagacttcaggaaaactatttccacatggtaaggccagagtctccagtgttagccatccagaggcagctcacaatcgtcctttgccggagctgcaggttcagaagtcctcagaatgatgggcacatttagaacagtggggttctggtgatgagtggattagagctgctggggaccaccagacatctgtgggtcagcttctcctgggacagctgagtcatccctgaaccatcagcccttagaatcaatcacatttttcttagggactaggaagtagcccggtctcacgcctttggcattccccagagggtaagaaatacaacacggggccccaccaaggccttcgaagcacaacgca

SEQ ID NO: 698 - DNA, 374 bp, Rattus norvegicus
aacaatcacataaggaagcatttatttgaggttgaacatgaagtcacacaaataaaaatttgtataaacacaaatccacattgagtcataacacagggaaggaacaaaggacagattaacaaaggaactaattggcagctatgtacagtgggacacaattgtgtcatgtacactacaaagtctttacaaaataatcatcttaggtcaacagaagatcaagcaaccttcaatgtcgtcctgtaagatggtttctttacacctcctgctctcccagcgtcctcctttagtagggctggtaattgttctggtgattgccaccccctcgggatgccttgccataagtgctctgctgaccgctgtagtctcctcgtgcc

SEQ ID NO: 699 - DNA, 485 bp, Rattus norvegicus
aatgaagtagacatcgtttaatttacaaacagcagggtaactgatattcgtctggagaaagacaaagcagaccgaattatacacgtacatctaattttcattgttaaaggtgtttttcctttttaaagaaacatctgcttcttcacaggggaccctgggattttaatgaaagaagagcacagtccactatgtcattaccaactctacattggaatttagcagcaaacaggttaacgtgggagcggtaaggtaataaaggagttttattgtttggagagaaattacaatttttgacataacagtctttcttctcccacccttccccaaggcatgacagggaaatgttgtattaattaatttgtcaaacatctacttcttactgggcactgctacagataagttcattcttcctgtgaggacctgtggcagatggatacacttgctgtttctactctgagactttgcaagcgttctgcaagtgtcct

SEQ ID NO: 700 - DNA, 595 bp, Rattus norvegicus
  misc_feature (1)..(595): n = a or c or g or t
aagccatagaagaatatttattgatatgggaaaatgttaacaatatacttctatatgaaatatgtaggatacaaaacagtatatacgatttaataccatttttacggaaagaaaaatagccatatatacaaaatcatgcataataaaaaataaaaactgtatacaccattcatggtcatctctttagtggactggatgtgattacaattcactggagtgattacagcatccatcactcgcctgccctgtaaacagtgtctgcttcatctgtcctgtgattagtgcttccaacagtctgtctctgacagacgccttcccaagcagcttctccgatttgctcttatatactggcatgtagagaacatttcaactgatataatatagagattgccacagcagatgcctggctttagaaagttatttggagaactagaaaattctctacataggattttctctaatagagaaaaatatgcattgatggtatgtgaatacgtaatttcaggagttagaactgaagaatttaggatctncccttccacctgcagtgaaagaaggttaaggatctcaaccccataaaacgtgattagtaatc

SEQ ID NO: 701 - DNA, 431 bp, Rattus norvegicus
cctgtaataaaacgcagcaaaactaatgcttcacaccacacaattaaaagccgtggggctgaaaaggaggagacccgtacgctcactggagacagacatgcagattatgctcaggtcggtgctgaaacagcaggcactttatgtgctaaacttaaagaccccaccagccccaaatcccagtttgctgaaaacagcataaatctgtattagggttacttaaaaccaaacacacaaacacagcttctgtgtctgcaaggggcttctggaacagcagggagggcaggtaggagaggaggggtggggctgggaaggccacagtcgggatgtttccagttccttccacgtgctaggagaggatgctctcacatgcagagtgtagacctggctgaggctcttgtctcacatcatggaagatgggttcctgggcttat

SEQ ID NO: 702 - DNA, 544 bp, Rattus norvegicus
cagtacataattattcaaataaattttaatgatttcaattcaatacaactgaaaatgtagtgtcattaaataacattttctgctataattcaaagtacagtttggaggccatttccgggcagaagcatcacatcctaagttttcagcttaagtgaggtgactgacggggtcatggcaggggcggggcaacaatgatcagctcatagaatttggcttggtgggcaggggccccgcctcctcgtgctcttcagtctgagacctgacaaccacgagggaaggagctggatatctgctcagcttttgttcattcataaactccaagtcaccatagatactcagcttctcagggggcacgtattgctccacggttgtagccacagctgcacagcaaatccagagcaacaccattaccgagagcaccagagtcgtagttaaaatccacccagagttaagagacagacatcttaaaaagccatcgctttcttcatcttccaagtatttcctgtgtgcttgggagtttcttaatctgtaaataggacatttg

SEQ ID NO: 703 - DNA, 536 bp, Rattus norvegicus
gagcaaggtttaaatagactttattgttacaaagggggaccccatcaagcagaaccaatatatgtggtcccagttgtcaccatggagacatcgagaggtcatgattgcagaagaggtgactggaattgaataacatgatcccagggtaagccagccaggaatgcaggaaacatgatcaaggtgggctggcaagagtggtctagtcaaaggatgagggaagacgctcccttcactcccgcttcttgtagctttccaggtgtgacaggacccagcccgcaggtagaagacaacacacgaagcaggaagtgagcccaatggtgatatccaggaccccgagctgctcccgcggcggcttcgagtggacctgagcccgcggcaccataagccgccgggccgggccggtcaggctcctcagcagcagcggcgtcagggaagacatgacggcgcggagtgaccaaggacaaggaccagccgaagcccaaggtcaggaagtcaacctagtgccgaattcttggcctcgagggccaaattcccta

SEQ ID NO: 704 - DNA, 631 bp, Rattus norvegicus
gctccgtcttttatttggggacagaaacggtacaaggtcagatatctcccagagggcactctgtggatatttattccagcgggagtcctgatcccagggagggtttgttgagtaagcgtctggaatgagtggatccgggcatcaggttgttggtgggcatagggtgggttcatctgtaatactgcctctgtgtgttgaggtcactgtatacttctggcctctgaccctgaagctcctgataaggtgactcagtctcagccatgtgctgtttccgggtcccgtctgcagtccctcggcctcgagagaccaggcggcccagagagtacaccgccagggcgatgagcagagtcagcaccaagtcgcccagcacaatcccagccagtacacccgggctcacagaggaacattcgcatcctgggtaattgtctcagaaggatgaagagggagacacaggttaacaatcagggctcggcgttagcagagagagagagctagaaggaaaaggggtagcctgaggaaatcttgagaggaagagagaaagaccaggggtgttatggcttaccactctgggcctgtacgggacttaatcctcccacagtcaggaggacaggaaggaacagaaagccccagg

SEQ ID NO: 705 - DNA, 405 bp, Rattus norvegicus
ggcttttattattcacatgctcggtagaaaacggggtttagtaaactgggtggaggtgtacggcaagactctgagttggtccggaaattatttacacctgagggcagcagcactgttcgtcacttcaggcacagcacgtgcacttgtccgaggcacctttgcaaacacagccctgggcacatttggagcagcccacggggcagcaggagcagcagctcttcttgcaggaggtgcatttgcagtttttgcagccgcaggagctggaccaggtgcaggagccgccggtggagcaggaccagttggggtccattccgagatctggtgaatctggagcaacggggtaagctacaagaaggcagtccctcgtgccgaattcttggcctctagggccaaattccctatagg

SEQ ID NO: 706 - DNA, 531 bp, Rattus norvegicus
gggggggaaaaggtttattttttcctcagaagaaacagactggggaacatttacaacccacattaacttgcagttggtcctaaccctttcgggaacaggtgttaaaatgttaggtgctctacggaatgaaggtgttcaccccagacagaatgtacatggacgatgcttgaagactgcatgttttttccctgagagacgtgtaagacaaacagaatttgctgagagccatctttccaaacagcccctccctcttcacactttggaggatgtgcctcaactattcatctagtcagcactcagaccacatgctgctttccttctaaatcaatccctttcccaaccatttgaactctccaagtcttcatagccctggaccgaaaatacctactaagatcctatctgtacttcagctttcacaccttgtgagctgggaagtcaggctcctagtaaacaaaacttccataactggattatgaggccaaccttttagttaccttaacctatagggtttattcaactacataaagtgct

SEQ ID NO: 707 - DNA, 522 bp, Rattus norvegicus
aaacaccaaaataggtacaaatactataaaattggttcaaaggggtaaaaattttaattaaaatatctcgatatatttaaaataacaaaggatacatttaagccaaattttcttaacccagagtttttttttgtagcatttgcttacatagtaaggtgctaataggagttagcccttaagccctggaagtcttaggaatcatagtcacacagcacatagaatttcattgtgagagtgaactttggtagaagaaaaatctataggacacctgaggtagtagaaactggaataaacagcagtagacgttatttacaacttgagtaccaaataacattaaaaacacaaaaataattacacaatacaattttcagtccagctttgatccaaagaaaacaagaatatcacatcacatttgcatcgaaaacaaaacagcacaattaccagcaagccgaggggactgcaaacaaactcaaacacggtgggtcctgacatctggggacagtctgagtttgaaatgtggca

SEQ ID NO: 708 - DNA, 575 bp, Rattus norvegicus
ctaaaaactgtaggctttttattcagttaagaggtagacagatgaacatggaaggctgtcccattgaatttgcccaaagttcccattccacttcattcacccatcccacactgccagaaatctcaaaagaataaccacaaccaccaggctttgtcttcctacttcttagcaacacgtccacgaactgtttgcaaagaagttactacaaacttaaattttcactgtgccaaagattctcggccctctaagaagttgtcacatgtcaacagaacctgccactagtgacagggagcagagtgccgtgactatttctatgagagactacaagggaagcttcagttacatgtttgttaaatccctgtgcacgctggggaagaagctggtgaggccaacaaagcagtatatgccatcaaatggctctgcttggctgtttaaaaagaatccacattaagttatctcacagacgacattaaaacataatggaattgatgcctgatacaaaagttgagaaatatgtacaggaagtcatagcccaagagaaaagggaccttagaatgaatcaatggaaacctggc

SEQ ID NO: 709 - DNA, 503 bp, Rattus norvegicus
cttcttctcttagacacagtgtacacacgacagcctacacatggcacatgatttagcaaaataaaacattcacgatatgattgaaataacaaagtgtctcagctacataaatgactttaaattatacagtaagtgaacaggagaaagaaacaaagctatagcttattgaaagcgcaaaaacggctctccaatgatgtgactttacgaaagaccttccttgcccaggacttctcgccaagacctcaacagccacctggggccgtggttctgccaatggttttatcttcaggttaacttcaggtgcctcatacttaggcctcacctcaagtctgtccgggtaggagggaggctgatcacacagggactgagaatggccagagacttcttgggaaagaggctggggtgtacatacgggagagcattgagcagggtagatcaggagcgccatattaggagactctgaggttgaaagagacaacttccaacagtaagtcagaggttta

SEQ ID NO: 710 - DNA, 587 bp, Rattus norvegicus
ccaagtaaccttaatttttatttaaataacctccagtgagagcacagttaagactaaccatttttctcaccccccaatacacctcacaaggaggtatgcggactgcctctcaatggaagcggccctggcctctgccccggccagctgctggagctggagcatccacagtggagcgggggttcttgatagtctcatccacagacacaatcaggcacgcagcctcagaagctgctgtcagagcgttgatgcgcaccatggctggctcccacacaaatgcctggaagttgtcagcaatgtcctcgttgttgatgtccaccccataccacatgcccccctgtgcatgtcgagcccgcagtttgttgaggatgtttgtggcatcaaagccagcgttgtcacacagctgtcgtggaataatctccagggccttggcatatgccccgatcaacatttaagagggcaatcttggggttcttatacttcttgggctgcatttcaaacccagcataagagaacgtcttcttgaacgcaacaccagccactagtcgagactcctccagggctccaccctgcaccttcttcctcgtgcc

SEQ ID NO: 711 - DNA, 700 bp, Rattus norvegicus
tgtttatttccatctttaatactagtccaaaacagactgatacccatgagcatagtttaaatgtaacaaagaaaagagttaaactatatacattaaggaaaaaggaaagaaaacctttttttataccaaccttttcctattaatgcagtttctgattagaactaaacatgtctctttctcaatttaatttaggatgaagtaatagaacttttatgatcaacttcataaactgtctttaaggagaaaacgaatttttaagtgggtgtcaccatatttaccagtgaactggctgcatggttgccttgtctccttgaagtctggctatcattagaactaacaagatcaagtccatgaggccctcggggaactcaatggctgtgacatccaaggggagggcacataccatacatcacaatgatgaaagttaatgctcttaccctctgagtccatgtaaaaaaacttattactctcattcaaactaactgaagtcaaacagttaaaaagtcagaatgaagaataaaactattttcttttcacagagaggagggacactccttcagctccatttaaagtgaattctgtgctgagtccctgctccttcagaacagtaaactgaaagtcagttattgctagcaaagctccagtggtctctttcctacctcaaagatgttccacacaaaaaggctattggtttgacttg

SEQ ID NO: 712 - DNA, 458 bp, Rattus norvegicus
ccggagctggggaccgaattttaggctttcttgattgactggctggcacggctggagaatccgacttcacgaagagcagagggctggcaagaggagggcagttgagcagcagagcttccttagccaagtcagagggctgccacgtctctgcttccaaaggtctcctgctgctgggagcagggtgatggccccaggttagcggaagtctgcgttgaaagctctgccaatgactagccgcctcacctcactggtcccacctacgatctcgtacagtttggcatctcgaagaaagcggcccatggggaagtcattgatgtagccatttccacctaaacattgaatgccatccagggctacttgtgtggcacactcggctgtatacagaatcacaccagcacagtccttggcagtgatgtggccctcgtcacaggccctggcgacattgtagacatactgtc

SEQ ID NO: 713 - DNA, 496 bp, Rattus norvegicus
gaaaggcatggatggattttatttattaccctatatctacaatctgaggtaaaatataaggaacacataaaatgcctatttctgctaccgtgtgatataatttcccatggtgaacatcgtggtgacgctactgagagcggtgccctcacaccctctaactgctgagagctgctgccttatacagtggcatcgtctgcgagctcccacgtggagccccacagagggcgaggacaccaaggtaccccactccccaccctggcaccgaggccagacaggtggttagagacaaccaaccaggcagacacaaggccagcctgactccacccagagcaccccaggtcactgcaggtcctggtggttagggagggttgagtcatccagctgctcaagcatgcacacctgaccactggcctctgaccttctggatacgcccagaaatttacttgctgcaaagtaacctcgagagagactccgaggtcagcctctccagttgcac

SEQ ID NO: 714 - DNA, 489 bp, Rattus norvegicus
agatgactcaggactttaatgttcttcatatcgtcaatcgaaaacactaacacatgaacaaccagaaaagacctcagcaaagatctggaatgtacagattgccctggttaaactacaaaaacagccatgcgatcacagtttgggggtgggggtgtaactgagttttgtttaacggtctaaccgaaaagcaaagaaacaaccatttcttctacttgtggcaagaaaagttaatcatggaactcctagatccttctcatgaagcagctttaaaagaaatcgcttctccagagcttcatcccctttgctgttaccaatgcgaaacggaatgttcatcctgcttctattctggcgctccaccggacacacataaaatccttgagaattatcaataatctcataaatcatttgggatttgacggagctgagcttctccatggctgcggacccaccattgttactgatccattccaggatcatgcccatgacgta

SEQ ID NO: 715 - DNA, 528 bp, Rattus norvegicus
gccaaaattttatttattcatttcttgcatttgaagtactcctcgatgacatccttggcctgagattctttgccatagtccttaactacaacgcaactgcaaccaaccactttccgtggcttcccctctcgatcgattttacagaggcctacccattcccctagtttcttgttgtcatcaacctttatcaggttgatctggtgctcggcacagagcgcctccaccagcttgacatacatgggctcatcacagttggatgcaagcacgcagagatgggcttggcgcttgtctaaggctttggcagcttcgcgtatgccacgtgctaggccatcgtggatgagggcggtcttcagcacctcttgtagagcagtgttgacgtccattacacctccagcagctatgccttcctcggccatggcggtggattacgggtgacgccgaatcttgaacgcacccgagcttccgcctccgcggaacttggcgcctcgtgccgaattcttggcctcgagggccaaattccctatagtg

SEQ ID NO: 716 - DNA, 540 bp, Rattus norvegicus
aatagtaaaacagccttttatttgttaatgttgataagaaatttaagcatgttacactatcttaaaaacctcaactagcgcacgtgaagagaaagtctcccccaccctagcccgcctgccccattcccctcaggaatcaagactctaagagaaggagttgactgaacgacggctctgcgaaacgtccatccagagtgcttacatgatggctggcgcaatactgccttcctacaaaacgtttcttctcttttctatttaaaaaaaaggtaaccttgatcacttattacaaaaaaattccatacaaaagttcatatattgaaaaacgcctttcccccctcccacacagcaccattttatatatagcagagaaggatcaagagcagatcgcctatctagggagagcgatcttcaattatgcctggacacgcagtggttttcttaccctccctgttccctcttaaaagaacttaaaaaaaaaaaaaattacatacacacattcaaaaaagaaaaaaaaaatgccaaaaacttgagggccccttt

SEQ ID NO: 717 - DNA, 498 bp, Rattus norvegicus
acgcgatcatcttcattttatttgtaccgtatttgtaaattgttaatttccatctctgttcaggtccgttccttctatctccctttaaagtctccagagacgagaatgagagggatttgatcttcactaaagtagccacagtcttctcagcaagccccgtttccactacctatcccctagctccccgccccctccccaaagcccttttcagggccatagcaccagcgaggatgctcatctgaccacactttgaccacacggaaagcaggaacttaacactgggcagagctgattttgtgaggtgaacaagatgttggcggtggcaaggaatggcgacagagacaaggtggagtgcacccttcccacacacttgccctggtaggctgtctctaggtcctcagaggcgataaggggttccttccccaaccactactgtctcgccattgatgtaactggcatcttcagagcacaagaaggaaactataccgacacaatcct

SEQ ID NO: 718 - DNA, 441 bp, Rattus norvegicus
gaatttctatgaaagtatttaatagttggtaaaaagcactaaaaggcaggattaaaagattaattctattaatgaatattttcaaggcacatgggtagttctctctaccccctcctcacccctgaatattataggaaaccacacatataatgcataaaaattcaaccttccaatatctgtgagaataggaaggggttccacagcgtttctaattatttgggaattaaaatttaaaaattaaagacatccatactcagtccccacagctttgtaagcatgtcaccatcttacagacagcaagcgaagaccagccatgccctgcgcagaggagaacacatttacagggcacagaccactctgcagccgacgtcagacaccccatcctttcagatcactcccaagaacctttggtccttactaatacttgattacttccccttt

SEQ ID NO: 719 - DNA, 646 bp, Rattus norvegicus
aacctgggctaggtttatttattgtacatatatactttattgagatttttttcataaattggttgggagcacttatggtaaggaggctccatttctcttgtcctttcgtactgggagaaattgtaaatagatagaaaccgacctggattgctccggtctgaactcagatcacgtaggactttaatcgttgaacaaacgaaccattaatagcttctgcaccattgggatgtcctgatccaacatcgaggtcgtaaaccctaattgtcgatatgaactcttaaataggattgcgctgttatccctagggtaacttggtccgttgatcaataattgggtcaataagatattagtattactttgacttgtgagtctaggttaaaatcattcggaggattttttattctccgaggtcaccccaaccgaaattttttagttcatatttattttgttttagcccattaggttgtttttatataagttgaactagtaaattgaagctccatagggtcttctcgtcttattgggagattccagcctcttcactggaaggtcaatttcactgattgaaagtaagagacagttgaaccctcgtttagccattcattctaatccctaattaaggaacaagtgaatatgctacctttgc

SEQ ID NO: 720 - DNA, 490 bp, Rattus norvegicus
caggtttttaaaaagggcttctttaattaaatacatgggtgagaggccaggcggaatgtcggagaggtgccccctacagaaagaacaaacaaatcccttaggacccttgtcctgcctgccctgcagacatcacccttcaatggttagacccaagtcccagttatcaatcagaacctgaagttaggggggagggaaaggacaccaggacaaaactctggttgcttatggagttaactgccaaagaccagacctttcccggttacaggagggacagaccagcaggagctgggatgaagcaagatacatccaaaagacacaaaaagaatggggccccagcccccgacccaccccgcaaactaaggcatctcatttttgtggggccaatggaagttcctgggagggggagctggcccaggacccttcgagcccagctccagaagggtgacctccctccaccaggctcaggtaaaggtagcaatacccaaagcct

SEQ ID NO: 721 - DNA, 483 bp, Rattus norvegicus
cgttttaaaatggctttattaaaggctagagtataaaataggaccaagttacaagctgtcagtaagaatttacgatttcgaaagtatgtatcaaaggagagggcagggtgaggaatggaaggccacccccacactggcatgtggggtgcacctggccgaggggcagattctgctgctcctgacaggaccggaaccaacccagagggcagaccagacgcacagagcctgggttcctgagggcttctgttggacacagccaccaagagcaagacacggagccctggagctgcctcccaggtgccgagcgtgggcgtgtggtagaacccagcatcatacactggcttcagccaaagagtgtgcttcagagcagagtaacgagtgtatgtcatcgtgatgtacaggggaagggaaagtgggaattacagttccggtttcctggccactgccgcatgttccctgggggaggccaagacgccagcgtaa

SEQ ID NO: 722 - DNA, 575 bp, Rattus norvegicus
accaaaagataagtagaaatttatttcaaaatttaatacaaagaatacaaacctcatggttcctcaaagacatcaaattactcttctataattttctcctaacttttgagctggcaggtagagaccatagaagaaaatgttacacagaccgaatcccaagcgttgcgtatttaagcatcactaactgtactgtattttcccaaaccatctggggagtttcgatgggattgttccagcgtgcactgaacagtagtgaattatcatttccatcctaaacccagtaagccgtctccggctgtatttcacccagctgaaagcacataagccataggacatgaaaggaactgtcactagggccagagggcctgataccttggtcagccaccaaacactcttgttgctacagcaaccagtttgcaaacagaaacgatacaggataaaccaaggctctgtgataacatcagggctaagtatccctttcaaagggtgtaatagtagcaaggtaacttagaaattctatccattggtatggatgaattttacctgagatgaggacagtgatggacattaaatgc

SEQ ID NO: 723 - DNA, 398 bp, Rattus norvegicus
gagaaagatttaattattgtgcattatatggattgggggaggggctaccaccttgatgtgagttctggggataaaactgaggtcacggggcttatgtgctaagaccttacccactgagctgtcttgctagccaagaagaacatagctttttaaatgccaatgaatcacattttccacaagtattaagactttaatgtctccgaataacaactttttaaaatgcacttcttatttatttttggtttttcaagacagggttaatttgtgtagccctggttgtactggaactcactctgtataccaggctggcctcgaactcagatatgtacctgcctctgcctcccaagtgctgggattagaggcatgcaccacaccactgcctgtaatttaagaatttg

SEQ ID NO: 724 - DNA, 475 bp, Rattus norvegicus
aatgctctgaaaacactttattacacaaattacattcagattctgaaaaatagtgttctaacagtgtaaccatctaaaaataagacatcccggaaacacaccaactgaggagaaatttaaaaaaagaatttaaatagagactttttaaaatttctctcattgcaatataatgttagtgattttaaaaaaatagaaggagatttagcagcttttcgtcgtgtggcaggttggttctcttcactgccacaggctgagaatgctgaacaggaaaggcaccaaagaaagacactggcgatgggtgtggactgggagaatactgtgttcaagcagagaatagggctatttacatccaccaactaaaacgtctccaaatgtgaatgagctaaacttccctcgggggttggagcgctaccttggaagaggagggcggcttctctacgctaagttcatataaagacaatggcactggagtgaa

SEQ ID NO: 725 - DNA, 457 bp, Rattus norvegicus
gagcttcaatctcaaacctttattttgctgtaaaggggagaaaaatgattagtggggggtttgtacacaacactttcatacaaagaaatgggtgccgcaggcctgatgtccagctttcttcacatttccccattccaatgtgaccagcaagcatgttgctgttccaatgacagtgaccatgccctggtcacaccatttttaagcactcataaaacgaatacacaaacagggttttcagagccaatttttagagaacattatctagtaagcggttcacgcccagccccctgcccttgcccagttttcacttttatttccttaatgttttgactgacagtttcccctctgctcggggtttaaagcaccattcaagcccagcccacaatgtattcagcagtgcagccttagccaagtacatgagtgaggttttctaccaaacatcacaatgacctcatag

SEQ ID NO: 726 - DNA, 576 bp, Rattus norvegicus
ttgtgaaaagtttaatatcaaagcagaaaaatattacttatcaaaaatgatttccccatccattttgaagtagaaaatgatgtccccaccttttctcaagtccaagatatgaaaagaaatttagataatgacaactccaattatagatttcacaactatcttgtacaacaatctgtaatgttttattagaattcactatcaaagacattgcacctttccagtctgtgactgaatttaatgatgttcaacagtggttttattatgctaatgcttgataatatttaacagtgaattcaattacttcacattaatgtttgccaatagttattaacaattcttaaatattttaaatcaaccaacctagaagtacacaaggcttactctcaactcttctgaggggacatgaagaccgaaagaaacctaggccctgagtccaagtgtctaacccacaacaactacatcatcactggtgaactcataggtaggtacttccaggttgagaggtgcagggcccttcctgatcctgccagaagcatcatagtgtgacccatggcaagggcaatagtagccaccaaa

SEQ ID NO: 727 - DNA, 639 bp, Rattus norvegicus
cagtatacaagagtttatttaatgatatgaatttagctccatcacgtagggccacgttacaagttccgtctgggcccattacaactctaacaacaaaaaaaccttaaaaaaaaaaagaaaatccacaactttctccatgtcattaaatatattcatatataataaccataatatattagtacgcattggaaagggacactggcccaaacagtatgtcatggtcacaactaaacatttacaattctgtgtgagcagaatcggcgacacaggagggaggccgggggtgtacccaggtcagggaaaggggaaagatgtccactgacacaagaggtgaggctggcttagtttttggctggggcagggccccacaaagagaattttgatacccctggggtatggcatggctctggtccacaggaatgtctgtctgtgaaccacagcccattcgtgagcctaacttgcccactctctaggtttcctggatagagcccttcagtgttgagaccctaaaggaaccatctcccaggtcagtcccaaagggtctccatttcagtcctgttccagctcggggcaattctaagagagcctgaatgtaaccactgaggcaaagttctagaaagtccccaaggccctcggaga

SEQ ID NO: 728 - DNA, 568 bp, Rattus norvegicus
aagtacagtaacgacaaacattttaattggtatccaaaagacatttctatgtaaacaaggtttccttgagcaaaggtagggagagttgctacacaagaatgtcatttgttcttaaattgggattgttgttcacctcacaggagccttctggttcaggcagcctgttaaagcacttacaatctgctgcaggtggtaacaaatggcagaggcagaggcaggaggttctctccaagtttcaggtcaatcagggtcaccgactgccacaggaactgtaacaatcctctgtgtgcagctctggtctgattagatttgaaggaactgggctacaatgtggggaaagcaggttcaacaaggccctaaggcccacggatcttacagaatgcttacgtttatttttctctgataaattcatttcaatgaattttccatggacactgcttgaaggcaagagctacatctgtcgctgtttatgcttggggttggtcttacagaggacaaaccagcgcccacgcctcttcaccatgttgcagtctctacagcgcctcttgatgacacccttggtcttgaa

SEQ ID NO: 729 - DNA, 648 bp, Rattus norvegicus
gagggctgaaccagacagctttattaggaggcttcttaaaggcagggcaggacaggctcggggtgagggcagaaccctgctgtggccaggctggaacaagttgcaggcttctgagacctctcagagctgagaacgaggtcctccaggcccaggtgggtcagtcctgttcagggtgggcagtgggagcctcaggctactgggaaataatggggcaggcgctcctggtaaatgccctcgtccttctccaggaacacacagatgatgagccgatccaccttgtccttgtgctgctccagccattcgcgcagcgtagctagcactacctccgcagcctcctcattggggtagccaaacacgcctgtggagatgcatggatagccaccgatcgcagccggtgctccagcagcaggtccaggctgctcaagtagcagctgcggagttcagccgcctggctggcagtgggttggcccacagcgatgggccccaccgtgtggatgacatgcttagctggcatccgatagccgcaagtgatcttggctttgccggtctcgcagttctgcagggtgcggcattcgtccgtcaggaaggatcccgcggcccgatgaatgcagccgtccaaccctccgcctccaagcagggagttgtttg

SEQ ID NO: 730 - DNA, 610 bp, Rattus norvegicus
tttactttgtatttatttatttttttaagatttattcattcattatatataagtactgtagctgtcttcagatacaccagaagaaggcatcagatctcattacagatggttgtgagccaccatgtggttgctgggaattgaactcaggacctctggaagagcagttgggtgctcttaaccactgagccatctctccagccccttttcgggctgttttaactctgcagtctagactggacttgaactcagatccatctgccaggtgtgtgccaccgccactagcgttatctttaaggtaagtactgcgtctactctcaggggaacagaggaggaggcacctctcgtctattgcaggcacatgtgcacatgtgcagggcaggggggatggagtagtttttttgtcatcactcctgactttgctacagagaccaggcttgatgaaacctcggcttgaaaaacccttcatcagcccaagctgataaaacagtacaccaaccactctcagacaggacgctcaatagatttggatctttttttttttcttataagaacaagtttctctaaaatccttcagccaccagtgaaatgattcctcgtgccgaattcttgg

SEQ ID NO: 731 - DNA, 315 bp, Rattus norvegicus
tttccagtgggtttttattagtagttgcatcatgattcagggtcccagggtagggaccatcatatactgagggcccccttttctaacggggagaagggcaaagagcagaggaaaggtgggcggagccaggtcagatcttcccaggaaatgtgccttcggctatgcgggcatcccaggctgagacccatgagacggggcaaagggacttgtacactcgccgggaccactcccaccctcgtgccgaattcttggcctcgagggccaaattccctatagggagtcgtattaaattcggaatcatgtcaaagctgtttc

SEQ ID NO: 732 - DNA, 588 bp, Rattus norvegicus
caagacaaaaaggcttttctttattgtgcctgtgaaatggaatacaaaagtcctggttaggtttgatcccctgtcccccaatcacagccagggactgtcaccctggaagaggagagtgaggaggtctagactcttcgaggtgggtcctgggaagtgagtccattcaaggcaaatggtcaagaaaggcaaggagggcaaggtggaaggcttctggcttgtggaggtagcaggcatgacctgcattgtgcagcttcaccacggagtggttgggcaggtggcggagctgctgaagtgactctcgcgccaaggtgtggtccagttccccatacaggataagagttggggtcttcacagcctggaattgttcctgtgcgtaattccgggtggaggtgggtgcgatgggcacgaatccacatagctggtggtggctttgcatcaagaagggtatggcatagctgccactcagtgaggggctcaccaacacagtattctgcagctgtaggtcccggagcacgccctccagcaactccactcggcctgactctgtgctcacctcctttgaaggggctgagttcccaaaacctggaa

SEQ ID NO: 733 - DNA, 613 bp, Rattus norvegicus
aatttttatttcaaaagcttggatagcttcaatatccaggtcgtggcaaaatcaggacacgtgtaaaataccttacaatacattagattcccaaaaggtaccaaaaagtacagtaaaattaacacttccattactggaaatgtatgacacaaataatataaaattaaaaggtgaaaaaggtgacactggtttcctaagatacagtttactctttacaaccagggtccacaggtccaggctgcagagcggcagcaggaagcagaccctccaatctagaacagggtaacctggtaataaaatcagccccctaatgccgctctgacctctgagacgccacacgctgcctacaacaactagagctctggaatagtaaacaggagagtgatttccgggggaaattttaaataagatgcacatgggacaggccataaaagtttgccaagttaaatttggtacataattgtgttcactccgcgtccaaacaaagcgtgtgcggtcgtcactcggccgctcctgctgcctctcagtatggcttgtagttattctgatgaccaccacgtcgctggctcttcccgtaatttgtactaccctgactgtagtcgtagccggggcc

SEQ ID NO: 734 - DNA, 596 bp, Rattus norvegicus
aggacaggaataagttttattaattacttttctaggaaatagattcagtaaatacagcacttttggaacatacatgtgctgttacacaagttttttaaatttttaagagctcttcaatgatgtttatcaggaaaatctctcattggtggaattacttctccagtctccagaattgtatcacctggaaatattctgggcttcgtgccaacaatggcatatggtttagtagccacatgatatttgacgtaatagtggacgaaccagagaggtatgatcacatgggaaacagtgaagagactggtgcggtacgccttgaagatcatgtacttccacagggcccggtcccgcaaaaagttattccagaatcgctccaggggccacatcctgcgcgggggcaacacgggctcccgggggctcagctcttggtccttcagccatcgccttctcagctcccgcagctgctgcagccgcagcttctcatcgggcgtgtaccccgacatgtcgccggcgagcttaccagagagtgacagcgcgcacccgaacctggggccggtcacttacgcgcgatcccgctccgcaaagcgaccccttgtgcc

SEQ ID NO: 735 - DNA, 480 bp, Rattus norvegicus
atgatgacattaatctctatttatttagtcattgaaacatggtgtacattgatgagttttatataaacatttagtacatctaaaatccacaattggtaaacaatctgtgcttgcatttgtgtacaacattggcatttatatctggacgttttgttgttgtggagacccagtctctgagtctaatcacattgctccgtgttaccttaacaactgtgacagaagtgatatgttccttacaaggatcgttgcttcctagaaaaggtgtcacacatggggctaataaaccggatatcaaggaaacaagagaaacacagttgactttagataaaatacatgcaggagatttctggagatccatgtcaatgcgcagcggtggcacaagcagtgtggtacccagaatgaacactcagttctaaccatcagatactcgggtcaagtctccctgccccttctgaaaggggtggtgctagccagagctgg

SEQ ID NO: 736 - DNA, 461 bp, Rattus norvegicus
ggggttttatatttattgcaactacaacttttcaaagaacgttagttatttaaattttgttcagacatgcttaaatatatacaaaacgacagtctctaatcccttgaggagaaggcggaacttcagtgttcctcatcggttcaggcacctcgccttgttgcaagcatttccaggcggcctttgagtgtcagttctgcagcactgcttctgcagcgcagcccctgccggctggctcgcggggacaggctatagcccgcggctgtcagcagcacagtcctcgctcgacttttgaacctgggtaaggagatgtccgggccttgttgtgggaattgtctttgacaccattagaaccagacatgatgttggctttaaggtgaaacccacaggatggaaatgggtttctgggtgcggggatggcgcggcagcctgaggaccggacagttacggacgcgagggccacc

SEQ ID NO: 737 - DNA, 419 bp, Rattus norvegicus
gccataaaatatggatattttattccagcactaaaaaaaagtgaagggaaaaacatattgttctaaaccccattctaagttaactggcaataattgggaaaactgaagcagatacataaatacatacatatatacatacatatatttttatatgcatgtttttagaattcagtcttactgacatttatatcttcacttcattttgctttctaataaattctattacaagtcatagaatatactcctagtatttctactacttcagttccctcatcaatcagttaatattatttgtgttgaattcattaatttatgtttttaccatttgtctcattgaccaaactgtttatttgaaaatgtcatggaaaaatttcaagtcacattctgtcagttacccgttcattatgtgattttttttt

SEQ ID NO: 738 - DNA, 565 bp, Rattus norvegicus
aaggacgcacagactttcctcctttattgttaagctgcaacatacatggtttaataaaacaacaacaaaaacatttaacaatcaagtgaaaataaactagaaatgaacgctcagaacaaaatcttttccactggaaacatgtcaggacggactcgggcttcgtccccacctcacggcgatttccttgtgacttaggagcctacataccccatgttttctgtagccatgcaggcgtgagtggaagtctgaatgattaaataaacgcaaagtctgtcgtttactgtaaagaatcatctcccgaggcagccaaactgagttagacaacaaaaccatttaagaaactcgccacatgttcgggttcatcttagaatccgtgaaccttcagctgctcctccttgacgatgccaacctccaaaagaaactggcaaatgttcttcctttggtcgccttgaagctgaatgacctctccgtactcagggtgttcaatcacagtcccattacaggcgaatttctttttgaaagctttcacaagtttctttttgtcataatcggccgcaatgccctg

SEQ ID NO: 739 - DNA, 496 bp, Rattus norvegicus
tgtctccgaataacaactttttaaaatgcacttcttatttatttttggtttttcaagacagggttaatttgtgtagccctggttgtactggaactcactctgtaaaccaggctggcctcgaactcagatatgtacctgcctctgcctcccaagtgctgggattagaggcatgcaccacaccactgcctctaatttaaaaatttgtgttttagttgtcaatgaacaaagaacatatatctgattcaccaggaaaccaggaaggaaggcctttaaatcaaactagaaaactgccattgttggtgggacgaatgtgtatgaccagagctgtggcctgcccatgtctgaacagtgttgctgaggtttacgggtttctccggaacttcctggaaaaacaggttccctggctaccatcggaaaggcacttgtgcacattttcaattgggaaggtgactgcaagacagaggacaattctgacccattatcacactaatgaccc

SEQ ID NO: 740 - DNA, 522 bp, Rattus norvegicus
aggggtaaggaatatgatttcttaaaaaaaaaaaaaaagctcatatatgatcaggacagatgcaacttttaaaactttttctatgcacagttagcagaattggcagaggaaaggctcatgtatacagaaggccagctgctcttctgcctctcctgttgggacaagggtagtgagaaggtgagagggcatagccgactcttcccagaaaattttgggggctcctcatgcatctgcatcccctgtacccacaccatgcactcgcatactcctgtcctgatggccacaaaggctcaggacctagcatgtatttgtgcacactgcttcttaattgcaaaaaaagcccaccccgctgtggccctgagtagggacaggtacccaagggtggcacaaaatcatgtacctcaagtgacatgcatctacatgcatgcacacacactcacaaacatgctgtgcctttctactgtgggctctgtaaaaatcccgtccctcgctccaggcaatagtctggacctgcagcctaaa

SEQ ID NO: 741 - DNA, 492 bp, Rattus norvegicus
tttgagataatttatacatataaaagggtttaaatacaatcacaccatcattgatttaataaagctcctctttccaagatcgagaccgaagaggcacttgctgtttgcagacaggtaaggcgctgtgcagtagaccatttctctggggacacagttcactgtgactggcatttgtcagacttcctcctcttcaaactccactaaaggtgcatgtctgttggcttgggctccttcactgaaaaacaccttttttatcctgccgtcctttggggcttttatggtgtgctccatcttcatggcgatcataaccatcagagcgtctccagcctttactctgtctccagccttcacgaacaccttttcaatggttccagtcatgggagcgatggtgcctccctgagttccttctgcactcactggagacaagtacttgggtactggaatgccaacttcaatactgccttccatagaaaacaggtagatccttgtgcc

SEQ ID NO: 742 - DNA, 424 bp, Rattus norvegicus
ggtttttttttggtaattagcctttttattgggttttttttttttttaaattgaagggcccttactggtcctgcttccatgaatggccaaaatcaagggaaaggggagggcaaccagctggtgcagggagggtcatttccacagttcatttacccccagaactaaacagacaagcccagagtcactattggggttaaaagttggcaccatgggatgggacaaatgaggagtaggggtgtcgttaaaaaaaaaaattcagggtccccccaaactgggtgcctaggacgggacttggtctggttcaacccaagaggaatcagaagatcaaaagcaatttgggaaggccaaaaccgtcagggatggagggaaaaggacggtccagggggtgggaaggatttttggcaactggggtgaaaggaaaacc

SEQ ID NO: 743 - DNA, 556 bp, Rattus norvegicus
ttttttttttttttttttttttttttaggaaatttttttttaccgacagttgcagaagcaaactcagatcacgtgacccattttgaagtcagaagacttaattggacttaagaactgtgcaggggggagggtccacagctctttaagcattagatgtccagcttcgaaattcacttaatgtgtaaactgcatttattaattcctttggttccacacatccgaccctgtcactcgatgtgctcactaaacgcattcccccaaccgcagcaacctgtgccttggagagagtcctggtatgtctcctgaatcccgacttcatgtctggagcaccaagaaaggtgccttacagattcccacgaccatgggcaagctctggtgtcatgctgacctgccgtcgcctctaactgtccagttcctcctccaggccacgttctccttcgtggctgcggcgtccttcagggtagccatcaccagttccttggtcctgactgcttcgtccctgcgccgcgagtccctttccggcatctcctgcagcattaactgcttctggagttct

SEQ ID NO: 744 - DNA, 428 bp, Rattus norvegicus
ggaaaagtctctttatttgaatttggttctcaggacagggctccaagagcaactgtatgcaactggcccagccagtgggactctgaccccagtctcattctaactagagggtaaagtctttccaaaacatagccccaccttccagctttctctacaggggtccccaccacctccatatgagctttagaaataacctcccataccaggagatggatgagagggagggtcccatctcagtgtagacatagtagacaaaggcacagagtcatattggttcttctggaggtggcctccgctgggagtcccggccggacggggagtcactgctaccagagaccatccaaaggtagtttgggtgcacttggccctgcacagcttcacacaccatcagctccccgtccacagaaaacactcccctctggttcctg

SEQ ID NO: 745 - DNA, 453 bp, Rattus norvegicus
gtgtggctcttgatgatttattgaaaagctccggtaagaaacacagcaagctgagtgatgcatattgaagaattcaaacggtacagcccatggatacagaagagcacttagtgctttgcccactcacagttttgtcaggtgcaaacacaatctgtatgattctccttagttggctgattcttttgattccttcagccgtgcatgttttctttgtgtgtgtgcgtgcagtcgggttttctgacagtgcgaccgatctgttcccttctgggcacctgcttccttcagctgattaaaatttcactcgtttcttacagaagcagcatgattgtttaagcgggcatgttcctgggacgtgttcgatcctttcatttctgcctcggctactattgcgcaggacatgttggtctgagtgctcgcacctgggcgccatgctttcctccgtaccctcgtgcc

SEQ ID NO: 746 - DNA, 619 bp, Rattus norvegicus
tttttttgggctttaaatagatttttatttgtttatattatttttttctcccatacaggaatagcattacaacctaacattcagaatcctgttacacacatacacaggcatgccacatgaccaggtcgaggtggttgtgtccttgagtctgtcgacacatcacaacatggtcagtcaaagagttttcacttcagccagtctcaacacaaaacacccaacagagatgcactcaacttgttggttccatttggaactaggtggtagggaaagaaggtatttgaagcagggtgggggttgtctgcattcagtcccctgacacaaagctacgtggatcttgaaagccacccaggagctctggtagggtccttgttgcacctaagacattataggtcccagcaagttgctgaaagggttccaggctggggagcaggcatactccaaaacagcaccaaactgcactcacacacacagggccctgctgggctagactggcaaaggttagaaagtgacaccagctcaagagaaccactcagacttactggagaaagctgtaagttgccctttgatgtgattgggacttactctagaaacaggtccctctgacatccttagttttggc

SEQ ID NO: 747 - DNA, 638 bp, Rattus norvegicus
gaatttatagagttgatattacctttattttatttaatgttacattaggcatcattgtttcattctgtatgaggtaaaattgatacaactgtgtgcttaaatccatagttacaatcaagttcacaactgcaggctacaaagtggtttgtgacatttattacaattacatttttactgtgcaagtgttgcaagaatttctcatggtgaggtgtaccccaaaatttgtgtatctctggaaaggggctcatagaaatttgtgggtagggctcacagaaatatcaggcaggactgttccaagacccttcaccaggcctcaggagttcctagttgcttacaaataggtccctgttatatgaccgtaatgaaagaaattccatgatcctccttcctggattcccaagcagaagtggagtccaagatgatttgtcatagtatacctcatctttgcgcagaactgtgcctttgatgatctccagggcgcattcctccttgggagcagcttgactcaagattatcccagaggtttctttcaaagctgtttctgtgtctatgaagccgaggacacagagagtgatggacacgttgaccttggtcatcaagtgttcttttctaatggtggaaaagaacccatccagagc

SEQ ID NO: 748 - DNA, 448 bp, Rattus norvegicus
  misc_feature (1)..(448): n = a or c or g or t
tttttttttttttttttctgtgaaaagacaaaaggaccaaactttatttctctacgcagccttggctggcctggaactcactatgtagaacaggttggccttgagctcacagagatcctcctgttgctgcctttagagtggctacctattggcaacaagcgccctcagcagagcactgatgagtcctcagagctcgtcggacgtgatgttcaccttgggtaggttacattctttactagtttgacagctctgaagaatgtcctggtagtggttcttcagatcctcatacaaggcaacagttttctgcgagtgagctaagggtaacaccttttcattcagcagcatttgtatctggaatttttcttgaggggtctgtgcgtcttcacaatggtaaagcacanatattaggtttgaagcatatggtacgatgtgaccacttcggaactcc

SEQ ID NO: 749 - DNA, 256 bp, Rattus norvegicus
tttttttttttttttttgactttcattctttgtttatttgaaaaagatgtcagaaagcatatgacaacagactgactcagaagcgccaggcaaagggcaagggacaaaagggagcaggagaggtgagagagggggcttctgtccccggagctgcaaggtctggccaggggttaaacagccacaaggagcacagatctccagggtggagaatcaggaggagccaggtcctgggagagcactgtctctggaggaatgt

SEQ ID NO: 750 - DNA, 312 bp, Rattus norvegicus
tttttttttttttttttgctacaataatgcacttttaatggtaaaattcttgacagcacaatgtctatttggcaaatcttctgttcaagcatccatccagtcacctctggaaaaggtgcacccactgcactgtccacttgtcagaggagcccttgaaattcagaaatgaaggaccttgtgtggagcttgccatgccttcagttaaagggacccacatgtggtacctgcaggaatatgctgtttagaaacatgtatttataacgtgttatttacccatgttcttaaatactgtttcagcttaacaatcaatct

SEQ ID NO: 751 - DNA, 471 bp, Rattus norvegicus
tttttttttttttttatagaattttatctccttttagttaaaaaaaataatcgtaccaccgaatgaagcttttttcattttttgggggagtggggtcgggggagaggtgttgagaggggggaaccaaaaataaaatgcaaacagccaaaagtaaagggaatttatattcctctgtataaacatatccactaaggcaaacaagccagggccacggctgctgagctgggctgggcttggcccctccgattctcacaggttctaagaccgaaaaaataaaacctttgcaagtcctgcaggggtcccgggggctcttgaggcattgtagtaaaacaaagagtcatcgagtttcacgagcagtgacacgaggaacattgcataacggtggccccggtggccgttcacttagactggggtgacgtcacagttccacaacacagcaagggacacgcacgtacacacacgtaaagcgtg

SEQ ID NO: 752 - DNA, 442 bp, Rattus norvegicus
cggccgcctgctgcgctcgcccggagctgctcacacttttatgccgctgctgctggcgatcgacttttccttttttgcagactgcgccagttctcaccaactttccgtctgaagttgcctttttttccccctgcttcttgtttcttttctttgcagactaggttcgtctgtccttgcctttttttttttctttctttctttctttttttttcttttgcagccaccacaactctaatagaagcgcacccccaaagccctagagggctgcagaagctcgggtcgggcagcccccgagatgcgcggagcagcggcgattcgcagtatccgcggctcagagaagctcagggacggagataggtgctagccagcagcagcgaaagcctcactgccgaaagctgaacgagagaggctgaacgcagaattctgcctgggcctcgtgccg

SEQ ID NO: 753 - DNA, 446 bp, Rattus norvegicus
tttttttttttttttttaaggaaaaaaatcagtttattaaacatttagaagaacaaataaagttttggacttgacagcataaataccaccaatatcatggtgtacaattacactaacctcctgttaacttgaacctgtttaacagatgcaatcttcgtggtgttgtcgaaaggataatagctaattgttatgtctggtgaggtgctaaaaaaaattacagatttttatgtctccactgaaacatccacacacaaacacacattcccctgcacacatttggcaagaccaacaagttttgctcctttattattgacattgatttgaccaaatacctggagttgaatttggcttcactagagggatgtactcaggagcccccagtatgaaccaagtacagtcagagccagagaagaagttatctacctcagggagggccaaacacctca

SEQ ID NO: 754 - DNA, 488 bp, Rattus norvegicus
  misc_feature (1)..(488): n = a or c or g or t
tttttttttttttttttagaagatgtttaagatgtttttatttagaagaggttatactattgagccagtcagctccttcatcccggcagcaatggctaagaggaatgtgccatcctctcatcctccatccagaccccagcgaggcaacccaaagcacatcattcaaaaagaatatccgtgccgtagactcagcactcaagaggctggaacagccaaaatagggaggccctgccctgaagaggagagggaggaaggcanaggggaatagacgtanactttccactgaaccggactacatgcagtacctagtgactttcctcccgttgcattttatttagactataaggttcacttgtgttttctggatatgcattgggtgctggggacattttgcttaccctcttcccctgaaccctacttctatcctanattgtgcgggccacctggccttgcaaatctttcacaggtgacccactcatataccatca

SEQ ID NO: 755 - DNA, 292 bp, Rattus norvegicus
tttttttttttttttttgggttcttaattttcccagaatctagcgcctggaatatatttctcctttactaaaatggaataaaagtttagtaatctgaccaaatgggtatttgctaagtaatccagtatctatatacaagcccaaaccaaaccaaaccaaaccaaaccaaaccaaaccaaaaccaaaccaaaccaaagagccgtctgtgtctgtgtgtgagacgtgtgctaaaactcaatcctatgtagtcagtgtacagggaataaataggctctggctttgggatgaaaaa

SEQ ID NO: 756 - DNA, 296 bp, Rattus norvegicus
tttttttttttttttttagcttttctctcatttgttgtcatttttaagatgtcacatatgaattggggaactttagcaccaaaatcaagtctctcatagtccatctagtttccccttcctccccacttaaaaaaaaaaagaaagaaaaagaaaaaaaagaaattaaatcacaaagtcccacttatgtcaaaaccttcgtccaacttgttcaacctttgtccctggagacctacacaaacccaggcaagattagtcaacaggggttcgagctgggaaaaaaaaaggtcctcgtgccg

SEQ ID NO: 757 - DNA, 476 bp, Rattus norvegicus
tttttttttttttttttattcttttgactttaataactcatcttatatatatttatatatttatatttcttcttatcttcatttcctcagcaaaaggggaaataaaaatattgatctataaaataagcagatgataacacgatgccaaaaatagcttatgttaagtgcacggggtgaagcttgaatgcaagctaaattgcaacaatgtattgattcgacatttaaatacaggacttgcaataaaataatcattgagatatatgcttctacctcttaccgacattttagaaactaccctctacacgtagatccagttgtaacacttgacagtagcattatggagcatggtataactttggtacacactgcagatatggatagtgatttccgtaaatgacagtccttcaccagatgaagctctacacagaccagccacctgatcccacattgttccccaacactgtttgtccccgagt

SEQ ID NO: 758 - DNA, 446 bp, Rattus norvegicus
tttttttttttttttttcgaggaagctggttgactctgtctgcttcactcctgctgcggtggctttaaagccacagtagtagcctgcaggatcacacttgtacacttgagggccttgctcttcatctataccaattaaaatcatacaacaaccaagtggcctcatttcagcattctgtgtgtagacttgagaaatatcagcaattcttttacacagcatgtccacaggaatctcatagccatatttgtatttccagttagctgcttcatagcgtgccctctgtacctgggatctgctgtcagctgtcattcctgtcatcacacagccaatgttttccgttatcttgaataagtgagtcacggtgctggaatccagtagtttgtcaggtactttcttctgtgtgacaataactgcgcagtcctttcctctgacagctacagatgtaa

SEQ ID NO: 759 - DNA, 312 bp, Rattus norvegicus
tttttttttttttttttgcattatgaaaaaatagatttattgcccaggagttgcagaaacgtctcccgagcagaaaggcacgggtctcaggccctccctaggcgcttcttgatgaaatggcccaccagccgctgcggcctttgctggtattccacaagcacattatggggagtgttgatctgatccccttgcagacggtccagaagagtgacacacaccacagccgctttcaggccacaggcactgcacatggtggcaaacactgaagattccatctcgatatttcggacacccgcggcatgggctgcacgc

SEQ ID NO: 760 - DNA, 313 bp, Rattus norvegicus
tttttttttttttttttaaagatggatcatacattgtagcccagactagcctggccttcacactcagtttcctaaatgccaggaatacaggcatgcaccaccatgcctggctaacgggtggctaacattatatttttaagtctttgaaaatgaattagtgcagctcccgtgccatgaggataacacccactttcgcataattattgcttaagcaagccattcagagtagatatgggctgtgtggctggacagaaacacactgagaaaggcaaccacgccaggatgctctttcacatcactgataaactcacat

SEQ ID NO: 761 - DNA, 404 bp, Rattus norvegicus
cggccgcaaaggttttggactagatgagtttccaccgaaatgtcggagaagtcaggccagagcacaaaagcaaaggatgggaagaagtacgcaacactcagtttgtttaatacttacaaaggaaagtccttggaaacacagaagactacagctcgacatgggttacaaagtcttggaaaagttggtatttcacggcggatgcccccacctgctaacctgccaagtcttaaagcagaaaacaaaggcaatgatcctaatgtgaatattgtgcctaaagatggtacaggatgggcatcaaaacaagagcagcacgaagaagaaaaagcaccagaagtgtcaccagcacagcccaaacctggggttgcagctcccccagaagtagcacctgctcccaaatcatgggc

SEQ ID NO: 762 - DNA, 530 bp, Rattus norvegicus
tttttttttttttttttcctaagtcacatgtttattggtcaaggggacactggacaggctacgtgtcacagtcctcagggacagcagccgtgatgatgagagacggctccaggaccccggagctagcaaagctctcctctgaacacagtctctggctagggagttgggaggcaaggccaccctgggtcagggactccacaatgacctctgcggagcccacctccaggtctgcaggtggctggagagccaccaccaccatcttctcatcgtcgatgatgaggttccggagcttgcgctgccgagggttgtagttctccactctatcgtggatctccatgtgcctccgcaggtgagcctgccgagtgaacttgtagccacactcggtgcactcgaactttctcacgcctttgtgtcgtctgacgtgcacccgtaactgttccactgctttgaaggtcttgccacagatctggcagaaatgaggtctgccctcctgatgacggctggccacatgcctcagaagcctcgtgccg

SEQ ID NO: 763 - DNA, 449 bp, Rattus norvegicus
ttttttttttttttcttgaaaaaacggggtttattgatttttaaactgcaaatagtcgttacaaaaagtttttttttcttttaaataaattcacacaaagaaagagaaatagaaagcgacggtagtgaccagcaagaggaataataattacattcatctttatgtgtgtgccagttgtttacatcaacatcggaaaactccaacctggagtccagaacctcaaatctgcaagcggaatgtcttgagatgggcacatggaattcaaagggtttttctctctctctcttttttttttttttgttttcccttttagaagctatacataaatggtggttttccttctgtactgtcacagaacttatacattctcagtcctacctgtgaaaggcctaaggagaaaaaaaaacctttgcggccgctccaacatcagaacctcgtgccgaattctt

SEQ ID NO: 764 - DNA, 376 bp, Rattus norvegicus
tttttttttttttttttaattcactcaaaattcttcagtttttacaaaactaacagggtggagtagggaagggagcagggaggcagccgcaggggtgggtaggcggagaggcaggctatgcttctgtcttcacctgagcctggttgcctgccacattgttcggctcacccttcatctcagcatcagtgggatggtccacctcaaatacaagtgtggcatttggttgccacagcaatatcccaagccttgatgacctccccttttcccaggtcaaaggagaatttgtccttgcggtccaaactggagtcaaactttgtgccatctagcagccagccagtgtagtggacaaagactcggtcccccctcgtgccgaatt

SEQ ID NO: 765 - DNA, 475 bp, Rattus norvegicus
tttttttttttttttttgaagggaatttgctttatttaataaactgaagccttaaagcattggtaatttctatgtactacattcacgtatcccagttggtctgaagtagaaatgtgtttctctagctttctttataaggttcaattatcttctttttacattaggattatatctaaacagatcatcagcaagagagtcttctttcgcttgttgtttctgtacctccatttcatgtttcaaccactcttctaattcagtattctttcgagcatggtgacctattaaatctgatcctccaataatgtgtggaagctttcctgctccaggacacgtagccttcttgaatttcttgaaattcttcagttcaccacgaccatttagtgggcacagatttctggaagagttattatggacaaccagtgacctaaattcagtcagcagcagttttcttggaagcctcgtgccgaattcttgg

SEQ ID NO: 766 - DNA, 536 bp, Rattus norvegicus
  misc_feature (1)..(536): n = a or c or g or t
tttttttttttttttttactagaggcagtaaagtttactcattaaaactcaatactgagtcggaggcatccatatggccccaatctctgaaccctgaatgcatagaaatggaagcagctagctgacttgcaggctcaggacttggtcggcctgctttccatagctagacgcctatgcatcctcctctaagagtccacccagtgtcccagtcaaaagcagttgttgctttctgtggccatgtggcactgctcctcatagacactggctcctctgtggaaggatctgccaacagcacatggaaacatgtccctgatgtccgcaccagggctactangaagccccagggctgagtctggctctttacatccttttcctcatcttgcccttcctggtgggagcaccccggccaaaggcgctctggcgcaactcctgngctcggcggcggttgcgtgctgaaagctgcttcaggccccctcgctgcangaagcgctgcttctgggcttgacggcgctgcttgagcctcgtgccgaattctt

SEQ ID NO: 767 - DNA, 563 bp, Rattus norvegicus
  misc_feature (1)..(563): n = a or c or g or t
ttttttttttttttcttcgcnaaaaactttatataagtcacacgcattcaataagccatctacaacggagcagaagacctcaccgaactaattcgtaagtctctcccagaagtgggttgaagggtttcccagtgcgctcccactgagaagcaacggcagacacagcaaatgcagccacacactgcatcctttccacaggatcagagaatgagctggctttgtggatgaggtaagtgtgctccatgtactcagtcagccgctgcagaaagctcagaggctcattaaagatgactggcattgtgatcttggacagttccatcccaatgcatttcctgaggatgctccagatgctgaagtcatttctggagaacatgtgatggcaggcttgttctgtgctttttaatgccgttggagagcgcatctcctccgccacagtccttcncttcggacattctgtgcttcncgctgttcgcaggcacttcgttctcttcanaggcgcgtgctgtcacagcttccagacaagtcagcgacccctcggactncggacctgacagtgcatcata

SEQ ID NO: 768 - DNA, 492 bp, Rattus norvegicus
tttttttttttttttttcagggtttgaattgactttattattctgtaaatgtgaactttacaaagcgttttacaattactgatgacatcctttgccatggatttccatgtctgaaacagctctgagcgccggctcacagctctcgggtttccctggtcagcttgcagacattgctgtgggttgtttttttttttcttttttttttcattttttaaattttttgttgtttttgttgttattgatacaatgttttcagccatggctacaaagtaacagtcttgtcacaccatgaaggacccctcagagtctctcagttacctttcacacatccacattcaagggcaaagtaagacaccgaatcagatgttagctgaagcaactggtatagaaaacaatacagaattcaagtactgcgacagccgggcagatatgcagcccctcccagctcacactatcagccctgtctctggtcccctcgtgccgaattcttgg

SEQ ID NO: 769 - DNA, 483 bp, Rattus norvegicus
tttttttttttttttttgtgagcaaatccaaatttattttaatgccatgtcatttcaaaaaccccagccttggttccctggaacagcatgccagaggtacaaagtgtaaccttcctctataaacccccagcaagtcatccaagtcctcagcttcagaaagtcagttctcttcagtctactcctctggttcctggtttttctttcaaggaaggcaacttaaaaattaggtagctgagtgtggtggtacacacctctaattctagcactcaggaggcagaggcaggtggatctctgtgaggctggcctagtccacatagtttgaagccagccagagttagtgagaccctgtttcaaaccaattctaccccaccatttaaacagggaacaagaacccactgggattttcagtgtaggcctaaaatcaagtgggggaatgcactggaaacagagttgggaaacactttacaattttgcctcgtgccg

SEQ ID NO: 770 - DNA, 475 bp, Rattus norvegicus
  misc_feature (1)..(475): n = a or c or g or t
tttttttttttttttttggggaaattattctttattgaaaaataccaataatactgacagattccaaaagcagttactgtcccagagtacaaagcgcttagctcatttaccccaaacctgtttgcatctcaaggttagcatttctgtaaatcaagatacaaatccgataacttcaataaaacattttccagctttattctttaaggagctgtataccttcaaagtcagggtcacgaggtcagcaggagcacggggcagaatgcacccggcactccctgggcgtcagtttgcagcaacactggaaaccacattgttggtgctggaaacaaaaatcccgcacaagatagctgccctccaggatgagagggatgttggaaacagcatgtcganagatagcttgtttttcttataattaacacactattattttaagattgctctttggaggaaatcttaagaatgcactgtaatttcc

SEQ ID NO: 771 - DNA, 496 bp, Rattus norvegicus
ttttttttttttttgatgtcagacacattttattataatcttaatacagtctacataaatttgaactggtatttatttgggttcagttataacatagcataaaaaaaaatcaaagcactggttgtctgaaataaagcgagcaatcgacaaacacacttgatttattttgtataaaagggttaagtttacaaccaaacttttataaaaagtttagcataagtacgtcattacatttcaatgcagaaagttatctctgccactgtacaagaaaactctaattaaagagtccacaaggtttcactcaatatatatatatatatatttatatataaatatatacacagcattcagtaggctcgtgtcaaaaaggccatttctgaccaaagacttcatttaagtaaccgaatactgggtccttctggtattcacgctccacctttgaaaaaaggcaaagtctgcttagattgggcaattccttgtgatttttttttttttt

SEQ ID NO: 772 - DNA, 415 bp, Rattus norvegicus
  misc_feature (1)..(415): n = a or c or g or t
tttttttttttttttttaaaagggtaaacgtttatttggagttagtcttctggcaggtggtattaaggcccttcaggcagagttcaggagctcctgtatggctgcctgctgctccggactgagttgagctatgcattcagtccacaatcctccagaagtctgtacttggcgaactacattggccaggcgtttggcacaggggtcttcatgtttgatggcctcatgcatttctccttctgcaattatactgaatattttcggtagattggtattatttgggccaagaacaattggatgattactttcaatcaggtcacacaggtaactgaaggtctggacagcttcttctttatcttcatgtanggggagccacgacagccagtgtggtaagacctcctccacattcacgcagtca

SEQ ID NO: 773 - DNA, 513 bp, Rattus norvegicus
  misc_feature (1)..(513): n = a or c or g or t
tttttttttttttttttcctcnacccancagggtaaagtaggtattttatttgtggtccccaacaaggcttcccccgcttgcttccactctttctatactttagaaatctgcatcctgggaggctctgagtgagtgtctgtccaggtcagtgcctgtgaatcttaggaactccagatggtaaccccaaagaagagagagaggggggataagtcagcatccggccaactccctcattgcctctccttcaaatcgaaaggagagccagccttccgattcggtcagatcttgagcccctagaaacttgtacaagttcacggccttcttgttccagttcagaactgccaggcggaactgggagcaccccttacgcagagcgacctcagccacctttttgattattttggtaccaatcccttgaccccgatatttcggcatcacatagatgtcttccagataaatgtttcgtccggtccatgtgctgtagatgaagtagtagagcccgtagcccacca

SEQ ID NO: 774 - DNA, 510 bp, Rattus norvegicus
tttttttttttttttttaaaaggatttaaaaattatttatttttttattacaataaatatttatcaataaagaattaaaccattgaaaactaaaacctactgccttaaagttggggtccatagcagcagacacaaacataaaatccagttgaaaggtcaagggtcaaggtttctagactccggtgacaacagtcaggtcctgattatatggactaatgacggggaacggtaacacagagaatgcagaacccacactcaaacgacccagagtatgctactatacatccaaccacaagacttggaacattccggtgaagtgaagcaggctcagagctctgcttcagcaagatcaagtatctcccagatggcgtccgcaagcacaccgctcccaaagctcctcccagccgaaagagggcctgggagacccagaaacctcaaccccaaagataatagccagcattctcgaaaccagtctttctggctccaaagttcctggtgaaagggacgtgg

SEQ ID NO: 775 - DNA, 443 bp, Rattus norvegicus
tttttttttttttttttatttgcagctgaatgtttattgcagcactcccaagtgatcactgttggatgaataaggaaacaattcataaccaataaaaatgttgaactgccttttttacagtaattgtacactcattgtgcttagtctgtaaagttgtatcctcagctcacccataaccttcccagaatagaacactctgtcatacattaacatagagccttcaaaaggtatacacaaggctcaactctgcaggccataccagatgctgtcccatccactagacagtttaagagggacacagcaagggccatgcagaccccatctcaaacatcccagtactaatactctgtatttgcttcttgtgtctgctttttctgaacatcaccacatccagttttccttcgcaagaagtctcctctcactggccatgcatttctgctcca

SEQ ID NO: 776 - DNA, 473 bp, Rattus norvegicus
  misc_feature (1)..(473): n = a or c or g or t
tttttttttttttttttanagtaatcctttaaatatttattttagttttaattatgtatgtggggtagggtatgtacacataagtgttgactcccagagaggccagtatatgacatcagattccctaaagatgacatcataaatggttagaaggtacagcacatgcatgttccaaactgaaccctagcaggtcctttggaaaaaccatcccaccagcccatgattttctgatgctattaataaaacatatgatagaaactactgtagaagaaagtgagaagattaacactctgtacaagtagagaaatatttaggttttgtcaacagagaatcaataaatatcaccttactcaaaagaatggatgacacatattttattactattctaaaaatttccagtacactaagacaatggaaagaactttactatcagtaagctaatganactcaagtctcatgtntccagttgggca

SEQ ID NO: 777 - DNA, 336 bp, Rattus norvegicus
cggccgcgggcagaagcagcgcgcgctgcacttgccgccccggcgtcccttgcgccgggctttggccgcggggaatgaggtggcgggggatgaaggcgccgccactccgctgccccccgggaggtcggccaccagggctttggagaagtctgccgtggcggcgccgcgcatgcccagcggggacagctgcgcttgagggacggccaggaactctccgccttcgccgccgctccctctctccccgcccggaggggtcatcatctccgggaggccctcggtcccctcccctaagtcacctggggccagcgataatgcatcgtaagcccctggcgggta

SEQ ID NO: 778 - DNA, 478 bp, Rattus norvegicus
tttttttttttttttttaaaagaaaatcagactgttttattgtcattatcaacagcccatagtttggaagggatgctgatgctgacacaacaccctccaacaagcaaattagactctcaagtagttcaatgacatgatgctgaataagttaggatgctgctgctgctgcacagtgagcctccattgaaagcactctcaaaacaggaacagactagcaaacactgtcttcttctccagggcttgcacaggacacacactcttggatggacgttcaggaggtaagcagtcaggaggcctgcacctgtctcatctcataacaatgctctcaccaagagcggatcccactaagccaggctttggcctgtttgcgttgtaaagagcttgtcgttcttttccattcaaggaagtcggcagaattgtgatgatcttacagtaatgtggttcatgacaacagacgtgaacattacagcattgggga

SEQ ID NO: 779 - DNA, 565 bp, Rattus norvegicus
  misc_feature (1)..(565): n = a or c or g or t
tttttttttttttttttgaatcttcaacgactgatatttcagtgaatagtgtatttgttctttcaacttttctgtatgtttggggttttctttaataaaagaaattgtggggaaatggctgtctattgagttgccagttattggagggtgtgtgtaggagccctgcccagtggaattcgacttgggagggtgagggaggggtgagcaatctgtctggggtgaggggggttcactantgatctctccttggagagtacaatgctgatgtttgggttactccatcctgaagtagtttggaagaaggccaaaggatcatgagacagacattaccgagaagggatctaagacctgaagttgcactgagaaagtggcacggtgggggtgacaacctgctgcttcccctgccctgcttccttcattttttccaaccctaagacctaagagtagagaagatggtactacagttgactgggacncacaangggtaaagtgtctagagaccggccaccctgaagtgtctgctatgtttctggtgttgcgcgccctctcgtgggcttctggggaa

SEQ ID NO: 780 - DNA, 553 bp, Rattus norvegicus
tttttttttttttttttggagatattgctttttattgaacatgtagaagatccacttttatataattataaacattttacaaacagttttgttaaaaaacatttcctggattttatcactgtatggttaagacataagacatatataagtatgaaggtcattctccaagtattagaacagaataccaatggagtcacttcgttttttttttttccagcgctcaggaccaaccccagggtcttgcacatgccagaaggttccttaccgctgtgctgcccttcagttaccagtaacatttttttcataaacactgtattaacctctaaaggggtaaactaacccggaggaaggtaatcctcaagacatattgtcaaagttcaccgaagtcgtctacagtctgtctttccttgcactgaatctggctgatgaatagcagtgtaagaatgtatataagataatcacactcacttcaagatacagaacacattgtaaatcaaaatttttatcatctttgctctatggggagaccactcatattaccatttttacattt

SEQ ID NO: 781 - DNA, 480 bp, Rattus norvegicus
tttttttttttttttttaagtgacacaagaaatggtctttatttggaaaacgattacaaaattatcatccaaactcagaaggcacagccaacacatacacacaaagtaaacaaggcaggactgcagcaatagctcacttaacaaaattttatctgactttgggtggaggaactttcccaagtaaaaatcaactggagtgctctgtacaaagctttcctaatgtctaatctcattaatgaattacttgcctttgcagcttttaagtcttgagctaagccttcagaatgatttattgaaaagtcttattcagttcagttttagagaagaaaactacaacttctcaaagtttagtttaacacggtctcctcttggcaagcattagatatctttagcttgactgttcctatttccccctctgtcccagctcttttagatcacgttagttatttttaaggatccatcttttttgacatgtctagc

SEQ ID NO: 782 - DNA, 475 bp, Rattus norvegicus
  misc_feature (1)..(475): n = a or c or g or t
tttttttttttttttttcactaagcaaaacatattttaataggaaaaaaatcacttcttttttaaaaaagtgtcctttcatgccaaggtgtatacacacaatgcatgggctaaaataggcagctgattcccggggtgagaatttaatatcctgaggttatgaagccaggccacatccacaagctggccccagattcttggctccccaggcccgggtgacaggcaggtgcggagattccagcctcagcactcacagcagggcagcatctacggttcagtcagtgtctccatccccttcactgccctccagggagctggggaccttggcacctgtgtcatccgctccaagtgcagtgccactgaagttgtggatcggcaaagtgttaagccactgggccatggaccgctcatcccgctcagtgctgacaatggtanggtagatgtattgctccttgaaagcagtcaccttcccttcc

SEQ ID NO: 783 - DNA, 482 bp, Rattus norvegicus
tcaatgatcaggtttctgtgaatcttacattaaaattcaattacatattaaaaatagagtagttatagctagaaaaaaatattttcagaggcagcagataccctgggtggaaatgaacagttctacatagaaaattcaggaagtatgcaaactagacaccagaatactcagtacattgaatttaatcagagagtacacacagaatatgacacaaaacagcagtttactagaataattgtcatctggaacacatgaaaataatttagaaaatgggctaaggtcatactctctgcaatagacttcttggaaatataggcatagtatcagacagatttatgtgtcatctggctaccttcccttgccaccaagccagcttgaaccaacagtgtggtatctattcaagcagtagacatgccactgatcagtaaattaaatctctagggagatcgttttatgataaagccatagttaactattgatat

SEQ ID NO: 784 - DNA, 435 bp, Rattus norvegicus
gccttctccacacacccttccgccaggacctgccacagcaggaccctcctcgcccagccttgaggccttatctgagtcattctccccctcccccacctccagaactggggtccaatagatcgtcccactcgggcagcagagggaagcagtcactagcttccaaccacatttcccaactctgtccttggtccaaaaggaaggtggacagggcaaaatcacctgctcccgtgagaaaacagctgcttaaaaggagggatcccaggcaactggtgaagtgagtgagggcagggctttactattcctaccgcccaggctcaggaggtggcaaatacatcgggatggagggtgattaagttgcaccagcagatcgggtcatgtgggagttgagtagatggatggaggtggaattattctagaagctagctctactgctgc

SEQ ID NO: 785 - DNA, 506 bp, Rattus norvegicus
gacagtccggtcttttatttagaaacctgattgctgaagaacaagggtggcgccatctccaacccttttcgctgggattgtttgtgaggtgatagtaagggctccagttccctcagtgacaagagacagtcagcagacaggaagtaggggccccaagggagaggcaacagctccctaaaccaaagggatcaaggtagggtggggcaaggtggggttgggaatctgctttcttgggagtctgaaaaactgcagccctgctgttcctgccactcccacgcacaaggtctcatcaagtctctgggtagagtggggttaagtgctaagaaggtgggggacaggaaaagctaaaggagcaaaggagggtatgtttggggagcgaaacctatagcctggtcgtggccttaggtggctccctgggactgcaacaggtctccctcgtgggtcttcacacaccctcaggctgggcccctgaaatccagtgctgggttccaatctgccctttgcct

SEQ ID NO: 786 - DNA, 405 bp, Rattus norvegicus
  misc_feature (1)..(405): n = a or c or g or t
aggaacataatctttttattgttttgcatctgtgacagttttgtgtccctctaaaggagacaaatttggagcattgttggccctggtaaaggaagagaggagtgggtaggcaccccgggtgctgccagaaccaagcctcagaaatggcctgcttccgccacagtctgcattatccacttataaagtccgaaacaacacgtagcaaaacaaataaattactcttcatccctcaaaagcaagttccgagttgaagctgccaagcctgggctctgggtggggcctccagaggttctggccaatgggagatgagaaacgccgagtttgcccgcatctcagaattccacgctctatttagacttgggaccttgtttgggcaactctncatcttccaagtccatttctgca

SEQ ID NO: 787 - DNA, 609 bp, Rattus norvegicus
cacgcaatggccaactttattcagagcatcagatggtttttgcaatcacaagggcaagcttcaagtgacaggctacgtgtgacagagacatgtgtctcagtagaggcatagaaaccaagaacaatcaccagttgtaacaagtaatctgaagtaaactcactcctaaccactacacctgagagggacagaaaaacagattccaagaacaattctgttaagaaactgaggtcacaaaactcttggcttcttggagttttctccgagcattcagaaatcccctcacacaactccattcttggaccatgttccgacaatggcagaacgatacccttgaaccgtaagccagaagagatctcttcttaagtagctttgtcaggtgttttttctcagcaacaaggcaagtaactcatgcgacccacctcccaggacatctgactggggtggggcctggaccatggcgcctttccctaacagttactggatgcatagaggtccacatcaaaccagagagttaggtggtcagtcagatcaggatttcagagagctgttgaatctttctaccagctttttatctcaagagattcttccttctaacttacgtttcttagg

SEQ ID NO: 788 - DNA, 556 bp, Rattus norvegicus
atggggttgtcataaagatttaataaaagaacaggtacagtttgttgacttttggcaagtgtttctgatccaagtagaacacaccttcatggatggtgtgtggtagaagcttcaagcagtctcttgggttagactgctcaggactgaaccccacccttgttgctcatagcttggcctttgccatgctactaagccatttttggactgtttagtgatgttaattatttttattactcaggaacaatcagttttctccttggtcattgtcctggttgatttattgtgtcaaggtgacacaggctagaggtgtctggaaagaaggactccagatgagaaaagcttccatcagattgcctatagacaagtcttatatagtattttcttggttaatgatggatgttggaagacctggatcacttggggtggtgccaaccttgggcaggtaggtggtgctgagttgtataagaaagcagcatgagcaacccatggagaacaagcctgtaagcagcacttcccatggcctctgcttcagtttctgcctggagttcctgcactg

SEQ ID NO: 789 - DNA, 637 bp, Rattus norvegicus
aataatgacaggcaatcaagtttattcgtgttcacagaacatactaggcgaccccagacagccgccctctgacaatccatggacccaagacttccagtcaggaagacatcaaaggccacagaccgtattcccaagggtctgccaaagtcttacaacagagtcgaagtgctggaaaatggagtgttacccctaaacctatgccccccgaccaagactaaactaatcctcccacaactctgtctcacggaccctataaatcgtaataaatatctgtgtcacagcaagggggcatatctcgcacccctgcataagttagaataaatattacatacacccctccttcacctaggaggatatacataaatacataaatattaattagacaccgagaagacctccgtccgtcaccagtgagcctagccaggacccacggtgcctcgggctcgccccaagaaccggcatcttggcggtagtgttctgagttagcgttgccttataagtcccagtttgggatacgttcttgcgcaccaggtacccctggtgcctctttgggttttttttccggactgtgacccatcgcgtttagaatgccgccgggtgttgctggagaaaagctttgagatccagagcatagtcc

SEQ ID NO: 790 - DNA, 646 bp, Rattus norvegicus
cagaatggcatgcaagtctttattgttcctagtctccgtgtgcatttggcactccagcatcgacttcacagacagtgtgaataaaggattcccatgactgtgagctataactactcacctggaaagaaaccaaactgcctctgaagtacccattacatgatactgcatactactaatgcatatgtcagtaatatcatgctgttcttaatgtctaaaaatacctgttaaagatcatgcaacatatacacttcatgaaaatgctcaattacactcaaacagcaaggcagtgtttcacggagcagctacaagtaaaccacacaggtccagtcagagatggacatctcaacgagcactaaacctgccacctcgccatctacaatcctgcccatggctcaggacatactgctaggactggtctacataaacacactataatcaaaggacaaacggtctcaatgcatgatgatgacaggcacgctctagcctacatgatacttaaatgtatgtggtcattctcctagctttgctaacaataatgggaagtgtcatggtcacaccagctccgactctgttcttgcttccctggatgctttcaaattccttcttaaaaccatgcctccattttgtaacccccgcagaactcaaa

SEQ ID NO: 791 - DNA, 644 bp, Rattus norvegicus
gctgtgtgatagttctttatttcaccatttaagagaaagaaagatggaggaaaggtaaacagtgttcaggcttcagcttttgccaggggaaggcttcgggtcatcgagaccccaaggtattgccaggtgcacaaatctggattccgtggcaggcaggcaaagtgatcgctctggtagcccttctcagagcccatgaggatctgatctgtccacaagcaatgactgtcactctccagtttgcaagggatggctgaacagggaaacactgtgcacaccccacagccagcactataggtctttacgaaggccttttgctgagcagggctcagattatgccagggaaccaggaagctgcaggcagtgatgtgcaaatttccgttccttaaacggcccgcgatgagaaactcctcgctgcggttctgggacttgtggacatatccacagaggctctccatggctggggtgtaggcgaaccggaaacctgtggcatttcccacagcgtcgaatcctttgagcatcttagtcatcttgatctcataacgctggtataaggtggtctcgatgatttctggggaacccatgaatttagcccttataaccaggtccgagttgcagaaagctgtctgtgggtgggttggggcaca

SEQ ID NO: 792 - DNA, 581 bp, Rattus norvegicus
cttaaagcttttactttgagacgtcatggaaaacttaagaggtacacatggagaagacatgatcacagaagggaaacagcatagaagcatcgatgcctgcagctagtgctggagctggagttgagtttgacatgatacagggactgcaggaatgaactagtattcctctccttcttcctcaccctcaccctccacagaatccacaccaacctcctcataatccttctctagggcagccatgtcctcacgggcctcagagaactctccctcctccatgccctcacccacgtaccagtgcacaaaggcacgcttggcatacatcagatcaaacttgtgatccaggcgagcccaagcctcagcaatggctgtggtgttgctcagcatacacacagctctctggaccttggccaggtcgccaccaggtaccacagtgggaggctggtaattaatgccaaccttgaagccagtggggcaccagtccacaaactggatgctgcgcttggtcttgatggtggcaatggcagcattgacatctttggggaccacatcaccacggtacagcaggcagcaagccatgtatt

SEQ ID NO: 793 - DNA, 571 bp, Rattus norvegicus
accttttagatttttattagtagttctctgaagaatcaaaatagttagcaaattactttagattcaagactgtagtatatcctttgttgtttaaatctttaatgttgaagaacataatacaaacaaaccagagagactggtttctatgcctaggtgttattcatttgtcatcctaaagcagggctggagaaggctgttcaacaactgggggttagtgctgagtgacaagtcgtggcctgtttcctcaccaatgtgctgggaaggagccgatgattactcaaactgcttacagcttcctagcacaggggctccaatgccctgggcagcagaggattatggtctaagccaaaagaaacagtctgaagaggggcacatgggaactgcctggcagaagaggcagactttgccccatgaggaaaagtgcatctttgtaccgcagagacattccagaaccagtgtaacactaagggctgtgtgtgggggaaggcgggccccggaagaacctctcagttgcattccacttgggttagagcccagtctgccagtgaagcagcagagaggacagcgtcta

SEQ ID NO: 794 - DNA, 450 bp, Rattus norvegicus
taaccctcactaaagggaatatagcttgcggccgccaaactttttttttttttttttttttttttatataaaaatactattttatttctcatcaataaaccccagctacccgctgggatgtcgcatgtcattacccaacttgctgaagaggatgaaacagtatgatctcaagtgcaacgccactctcaggtatacaaaaagctgctagcttctaaaatgaaataggagcccctagaataaatatgctgtaggggacagggggtgacattaagcagccagatcatccaagaatagcagttgtctgtcggagagcatgtatcctatcgtgaagctgagtttcctcctgatgcttttatagggcctgaagccctgactgctgcagaaaggcatgggcagcctctggctgatacaagaacagcagttgcagcagctccaaactgtggcctacca

SEQ ID NO: 795 - DNA, 627 bp, Rattus norvegicus
aatatttattcattttcgacaatttcatatatttttattatatttttctctatcccccaactcctcccagacccacgcccccccactgctacccttccaacttcatgtgtttttctctgtcttgaaaataagaactaaaaccaagaacaaaagatgaaaactgctataaaatatggagttctatttgtgttagctaactgcttgtgagaatggggcctgtcctgggatcgtgattagtatactcagaatcactccactgagcaaaactgatttattctctctcagaagagagtggaaagatcttttgccttataaaaatgaagccactcaacattccagcatgaatgtgggagggtcacagaagtacccaaccctaaacaaggagttattgacagctgatggtttctggggaggaagtcaattttctttaggggtatggcctttcatatattggcagtaacagtggatggtgtcacactcatgagtatatgagcagcagtaattggactctttgagctattaaaaaatacatgaagttaggaaggtgaaactttagaaacggggactcagaattttttaaaaggtcctcccagttctgagggaattcttttccttctttgaatcact

SEQ ID NO: 796 - DNA, 649 bp, Rattus norvegicus
cggaccataaaatatttattaaggtatactcttaaggaatatagtgaatataaaatgtaggatcacaatgtgaagcaatttgaatctgctcaaaagccagcacagccctcctaagctgcagatggagaccactaggaggaattactgcgggccagaggaggaggacagagcggcttttcaggaacggttactactggagcttcggacacctctgtcattgcaagaccacaccacattacactaacgcagcaacaatgcattcatattgttctcattagtcattagtagtcaatttgcataaaacaccagaaaacaatcaccatggagatcacaagtgagttagaaatggacctgttcttgcaaagcacgcactgtgatgggatagacatggaaaggagtgtgcacattacaggagctgcacgcgtcccaacaagcccctctgccttctttcctggaaaagcgaagtacaaggaacaggcacaactaatacttgggaggcagtgtgtagctaaaatctcatttaactaataagtcaatgatttttaaaatccccgtaaatcttttctgtcctgaggtagttgcaaaataaatcataaactgggtaatcaactacagtggaggctgcaactcttcattcatgaaaattagt

SEQ ID NO: 797 - DNA, 433 bp, Rattus norvegicus
cttcattggggtttattgaaatttcccaccaaggagagagtttgggcaaggtaagaagaaaccattagaactgctaggggatctcaaggaaaatggaggtgggacaatggaggaaatggccaatatggcaagggttgacagaagaatggcagggctgggctgcagggaggatgagtgcaggagtatgggaagcctatggctaaagctgtgagcaggccgggtctgggttgtaggctatggtggaggtgatgagggtagaacacctttactgaactctcagaagtttttgttccaagagcatgggcccacctagggctttccccaacccccaaggtgcccaaggaactccagaagggtactgcttgggatcagtctcttgtggccagaaaagaggattctgttgttctcagctagggtcctatccaccagtctt

SEQ ID NO: 798 - DNA, 490 bp, Rattus norvegicus
actacagggttgggacctaggaatacaaagttaagaatcagattctagttcactagcaccaagctctggaaaaggaaggcagacaattttaatactgtatggttgtttcccagatacacgtaggtggagtgcaaggaagtagggaactaacatcagctgcttaattccaagtgtcagacattagcaatgtttatttcccaattttgaaggcaggtttcaatgtccctgacttttacccagtaatctttgaagggtttgcacaaataaatatactgtttggtttagaagatgacttacccatggtcaaggatgctgaggggctttggaaggctctcccctacccaagtacttcctgcagtttagaggaaaaaggacatgggctcaaagataatgcagtagtgtgtgtgtgtgtgtgtgtgtgtgcccacgcgcgcgcgcgcgcgttcacgcacgtttgtgtattttcgaaacatggtctcacttaggcctg

SEQ ID NO: 799 - DNA, 497 bp, Rattus norvegicus
gggtaccaaaattctttatttgaagaaatggtacaaattaaagaacttttaagcagatgttttggtgcaacttatagaaaagataaaggcagcctgacatgcatgcactgcctcagtgaccagtaaagtcacatggccttggggacgtcagcttagctctcatcaccgtgtcccagggtgtgcttgtcaaagagatattctgccatgccagattcaggggctcccatcttgcgtaagttggtcacgtggtcacccagttctttaatggatttcacctgctcattcaggtaatgcgtctcaatgaagtcacataagtggggatcattcttgtcagtagccagtttgtgaagttccagtagtgactgattcacactcttttccaagtgcagtgcacactccattgcattcagcccgctctcccagtcatcacggtcaggtttctttatatcctgcaggaagatcgtccacctcgctggttctgcagcttcatcagtttc

SEQ ID NO: 800 - DNA, 557 bp, Rattus norvegicus
ccatttattgtatagttagagtttcaatatcttttcatttgggaaaccaaaagataagagaataaatgtacattcctactaaacttgcctttgaaactttaccaatttaaatgatactatattacaagattcgtaaggattgacacaagaaaggactgaaggatgtaagacatggcccatggctggcaaaaccggaaaggcaatggatatatttcagcacttcctatgtcctcaatcaccttttagaaaatccatcataagccagaatgtacatggtagatgctcctcagaaccacctcaagtgacgccacataactaccgcttaggttgcttcgaactaggttcaacctctgtggaaccccaagtgcctggtttgagaaggtggctaaacttaatgtaatttatagcaaaaatatacatcataattgtacctgcaacttttagagacaaaagtgattaacctggcactgacatccctctatcaaatgccggttaattgaaaaattagaaaatatcacagcaatataacaggttggggatcttaataggaaaagaac

SEQ ID NO: 801 - DNA, 554 bp, Rattus norvegicus
cacaggatgaaacacatgactttatttacaaaacagaggctcacccctccagaccacatgtactagcctacttgtctagctcccatggaccaatgagggcttagtaggggcaagtaaccacagtaatatgctccagccagccagcctcacttccagcagatgatgatgtttgggtcattttctagtcgctcgtccagctcatggtagctcatgcctgtcttgcagcagatctcatcatagctgtgacagcctgtgtagagccgggcagggtggcttcgttcctcccgagacactcggactggatatttctgtagtctccggatgaggttcttcataagcccaaactggatcagcttcctttcatcaacatgttgtaactgctgggggtggcggccgatgaggtctcgaacagtggtaccagggctcaggctgcagtacagctggaatacatctcggagactggctcttttgtgtccttgtttggtgacgtaggatagacatgcctcctgcagggacttgtcatccaccaggtcctggacttttggcgttgggca

SEQ ID NO: 802 - DNA, 648 bp, Rattus norvegicus
acatttaaaaaaatgacattgttttattttccctgtcaggcgtgggctgcatgtgtggtaggtgtggtgggctcagtgcaggtgtggatgggggaaggagtggaggaggcgatgacttggtggctggaagggaatggagagggttagatacgcttctgggaagtctggaggaaggactcatggcatgctatagctaagccaccaataaggttgagaaactcttggaaatctagctgcccatcactgttgaggtccagcttcttcatcatgcggtcgaggacaccggggtccttctggttcttcgtgaaggcggccagctccgtgttcatgaaggaaaggaactcagttttggagagatgacagctatttccatccttcccactgtacttctggaaaacagcaatcagggactcgatgcatctctcagtctctgtaggcatttttgccaagttgaggagcgaggcccggctgcgactgaggctgaccctcgtgccgaattcggcacgagggaggggtactcggtatatgttctctagaccttttaggaaacatggagtcgttcctttggccacatacatgcgaatctacaagaagggtgatattgtagacatcaagggaatgggcactgttcaaaaaggaatgccccat

SEQ ID NO: 803 - DNA, 688 bp, Rattus norvegicus
ggttgcatcgagtgcctcacagacactataaaaccaaaacggaatagaaacatctcggtggttaacagaacacaggaaagccaggtacagagtataatttgtcaaacacaatattgctgctccccgccccacccccacttcctccaatttataaaaagaagaaagaagaaaagaaaaagccatttggataaagagcaacacaaaatcaaaattggcagctcactgaatgcttaaaattcaggaaatcgtttttgtaactgaaactggatacattcaccatttctaacacttaggctatttttttttcaatacatagtttaagtccattcttcaggtgaaaaaaaaacatgtctttaaacacaacaatcaacactgttttggtgttccttgtttgtgtgtgtgtgtgtgtgtgtgtgtgtgtgtgtgtgtgtgtggacactgatctatatactgcttctatgccattgcctagggtgggcagcatgcatgggtaagaggaagggacatgcactatgtcatccaagtgccgcccagcctctgccacagatgacagaccctgcatccctcatttctagatgagaaagccaaggctgtcaagtcataggctctggagggaagtgcgagtataaacactgcagtgtggaaatccttcaagaaggtttttaacatctacagaagctaaacattt

SEQ ID NO: 804 - DNA, 670 bp, Rattus norvegicus
aaattgaaaaataccttattgataatccttgggaccatgggtccctagaaggcacgtgtaactaaacacccgtgtggcacccttaggtcagcccttcttttgcttgagcttttccaagtacacgtgcagggacttctggatggagtctctggagatgaaactggtgaagttctggatgtcagcctctcgctgcttgatcaggttgtccgccgtggccttccgcatcatgctcttcgtcagctgccgagaatggtccggaatggtgaaccacttggccatcactgagcgagccttgctgtgtacctgatcctcaggtaccacctcatccaccaaacccaccttgagggcctctgctggtgggaaaagcgtccccagttgaagggcacgctcggctgctcggtgcccgatggtgttcacgtagttgtcttttaaccagaagggggcaacaatgcccagcaggctctcattcaatcctatggtatacttggggttgtccgccattatcctgtagtcacaggtgagagccatgaggcagcctccagctggagaggcgccattgatggcagatatcaaggtcaggttggacaagtagagcctcagccacagctcctgcacagccttccagtactcagcgtagtgggctgggttccggccatacatctccatcaag

SEQ ID NO: 805 - DNA, 488 bp, Rattus norvegicus
ggtcttgttttgatccaaacattggtgttttaaaggttgtacacaatatttgttaaaaagaacatataaaaatacctttttagaagcttctataagaaagaaaatacaacgtttaaccccacaactttcctctttgctagaactgcaaactaccgctacagttttaaatagactttgttgtttaaactatacatccaggaaaatctaaaaaaattaaagaaacgtgcatataaatgattgcatagcagaacaagaacattatgtgcaaacagtaaagaaacaaaagttagaaatactattaaatatacaaaggttctagaattaaccctccaaacacattccacaaacagttcttaaaaccatcttttgtagtctacaagcaaggactagatttctaaaaacagaattgaaaggaaaagtaaggtgatcctctaagaggatcgtcccccacaatatcttcactcacatctgtaagcagtgagtctaag

SEQ ID NO: 806 - DNA, 591 bp, Rattus norvegicus
aggtggtaccaatctgtgtttattgaaaacctatgtccagcacatggtgcatgtttcaacatcgacaagacataggtgtatcccctgttcagtgaaaaacaacaccacccccccacaaggagaaaaggcacagtatatacacaagacacgagggctaggctgccccacggcaggggccataaattatagtgccggctggggacaggtggaaggaaggtagagtaggtggggtccaagcacaggaagggcctgcccctacctactctctgcttcaaccagcttgaagggatgagaagcacaaggagggacaattcctttcaagtctctcaggaagccctgagccaagcagtccacaaaagcaggaccactcttctttctaggactcccccgatctcaaggcaagagacctgagtcctgctgcctaccctgaaaatgagaggcttgtggctgggaaaggtgtgggaccagtgtctgccgccctggcttattcagacaggaattaggggtaaaaatacactctatgggaggtaggagttagggtgggggaggaagaacaaataatcatgctgaagacccctggaccctcgtgcc

SEQ ID NO: 807 - DNA, 694 bp, Rattus norvegicus
ggtggccaaggcatagtttattatgaaacaattagttctgagacaaatccaatgtaacacagattatacaagattccatattagttgatactagacatagcttaatccgaccaattttctaataaatttcatgtttgacgagacccctccccatcgccccagagtttctctatgtttaacaaccctggctgtcctggaactcactttatagaccaggttggtcttaaactcacagagatccacctgtctctgcttcccaagtgctgggattaaagatgtgtgccaccaaatctacttaaggactgtttcttatagagagtatttatggcaacatttataatagcacgggtcaaaagccacatggcacacacaatccttttataaaccacttcttattttgaacatatatttgaattgtttaaatgaatgatgtttcagaaaaaccacaaacatgaaaaactgactttagcatctcctttgttataatgcactgtgggtctgctctgaacagacagcagacctctcactgggcagggaggtgccctgctccgctgcagctggttgtagaaggtgtcaaggagcgagtaatactcgtccagcgtgagtgcaggctgcagctcttcgatataaaccacctggattccccctaggagatggcttatttggtcttctaaggctgacattctcctctgaa

SEQ ID NO: 808 - DNA, 585 bp, Rattus norvegicus
  misc_feature (1)..(585): n = a or c or g or t
aattgaattcatgtttaataattacaggcaccgtgcccaacccttccccctgccctggcagcagcaggggtggtgcaggggctggggcatatgcccccagcagcgaggacggcagtcccaagagtgatttcagaaaataaaaaaggaccctagaggcaggcggtagtgcccctccccccgcaaagacacaccaaatttcaagactttatatatatatctctgtgccctggggggaggagagagacacttggcagcatcctggaggggggccccaggcagccccaagccatcctgcctcatcagccactttattagctcaagacacatcgcactacaggcacccactgccactgccgccacagccgccgccgcccccctgcagtccaggcggctggctggctgggccatccacgtgtccatggctccaagtcccctgccccacccgccatcagttgtgatcagactcctcgtcctcagcctcacgaagccaattgaagaatgctgtgacagatttaagggccacacccttgccctgctgttcagcagggtccttgctgctctcccagctgtanaaggcgtcttcct

SEQ ID NO: 809 - DNA, 551 bp, Rattus norvegicus
ggatattagaaaattaaacctttaattacataagctgttttcaagaatcacgtacagagatttcccagagacgctggagttggcagtcggccaccgcagtagattgagcccaccatttcagcaaaggcgctgctggcagctctagcccttctatgtaggagagggacctctgtgaggccggctcatttgccttcattccatttccccatccaggaatcattgtgtacacccaactcccacagttccggtttaggtgaacaaggggctcagagtttgcaggtggcctgtgccactttggaactggtttttctgttcagggcttgacagatgaagtccccggcttctaggagcttctggaggttcacacccgtgtgaatccctaagccagtcagcatgtagaccaggtcctcggtagccaagtttcctgacgccccctttgcatagggacagcctccgagtcctgccaccgaggagtccacaacgctcactcccatctgcagggccaccaacgtgttggccagagcttggccataggtgtcatggcaatggac

SEQ ID NO: 810 - DNA, 565 bp, Rattus norvegicus
caagtttttttttttttttttttcttttcttcttttattccgttttacacgtccacgtacgtcatcatcacaacatcccatcaaaatatacaaacagcacgcgagactctaagtgtctaattagtactccaactcaacagggctgactagtggaaatagcatgcgtgggtcgtttgtcttgcaggatgcctaaagagggacttatttgtcaccgaatcaccaggagcaacatgatatgggattggttttctttctctcacaagagtcatgtacttcatttcttgtgcaacgggaggacgatgacgaatgccgacgctgacagagaaatcagccagaacaagagggaagagaaggtttgattggcagcagtaaactgccctgccttcgttggttggactttacttctgtgggaatgagatgcaccacatccgaaacatccttacccttcctgttggtgacaaaggctctgcacctcaccccttactttccgctgccttgtgaatttcagggctggccagaacgaacgggtttgtaaatctcaagtttcacgcttaacctcgtgccc

SEQ ID NO: 811 - DNA, 591 bp, Rattus norvegicus
gtaaataaggttttattaaagcacagctatggtgtacatgtcatttatggctgctctcattcctacaaagcattcactgtcacagggttgtggcaggaaatatagcctacaatgccataaacgcttactatctgactctttacagtaatttgccaaccacgttagtaacaatcttatcactaaagacatcatcaacttcttttttattagtatgtctataaacaggaaatacagttcattcacccagattttaaagctgtcctgaaatccaatgcttgtgtctcattagatttcttgcccaggagttaagcccacttcagaaaataggcaaacacattcaaaagtgttcttttattatttctagttaacatatattgtataaatactctatctttatatgcactttaacaaaagcgatataacttaaaaggttttatcattagaaataaatgtataaaaataaatatgttataggcatttattataaactatagtccttcttagaaggaacaaacaaaccaatacttataaagtacatattaaatcatagtaatgtattttactatatacatatggaaacagtcatattct

SEQ ID NO: 812 - DNA, 557 bp, Rattus norvegicus
acaaactccaaatccagcatttatttcggtggaagagcagagagggggctcaacccaggttaggtcattcccagacagagacagctgggcaggagcccctgggaatgcctctctacccagctatgagtttggaaggaagagaagaggctaattctggtactgctaccaacacagctgccacagccagaagctgggagacctcaagcagcaagctgacctctagaggtcaggacaaactcagaatcaggcaagaatcagacaggagcatcagacactgcaagagcacacagactcgacaagtgggaaaagtcttgggggcccccaaacagcatcgatatttcacaaaggggaccccccccagggcctaccggctccagggactgaatgctcagggaagcactaccacagtgagatgctcacaaagaggccttgatagccccccgcccaccttgtgctgttcagctaggataggaacaggtctggagggagaagggaagaaagagtcaaaagcatgggaagaacactggcaggacatgggtcaggacatgaaaagggtc

SEQ ID NO: 813 - DNA, 576 bp, Rattus norvegicus
gggttatattcacgtttaaaagctgttggcttatattacagcagatagtagatgggtgagatgagatgtgtcaacccttaatccaagtgtgccacctctggttgggatgaggagtgaggctggtgggggatccaggtctgaggacgtcacctaaacaaagggccactcagaaacttcgcccagtcttgcctggacatccaggtatgctctgatcctcgagccgctgccacagctgccgccgccactggtccataagccgctgctgggaagcctgggaactggtagccatagctaggagcaaatccaggatagcctctgccataggttgccacaaagttggggtagcccaacatccccatgccaagcatgaacgcgtccatggtgtatggcagcccccgggcccggcctcttgtcccaggtgggaacatgacttttttcggctgagctttcttacattctaccattttattattgatttcatggaaatgaattttacagactttttccacaacgtcttcattctcaaaagtgacaaaaccaaaccctttgtgcctgttgggggttttgtcgaacatt

SEQ ID NO: 814 - DNA, 490 bp, Rattus norvegicus
gacttttgaaatcagatttactcaggggtggctggatttgggggtgggttccaatccatcgttgcctggcccgtgtcaattactaacaaaggtcaaatacaatatgtcagacctaaagccacagaaggagggtgtaaaacgttctgttccggagagaagaactagaggtcaacgacgtgggacttcacctagagtttagcctattaaattagtagtaacaaaacaacacatcggggatttaaaataacacctggtagttccttccaacatacacagaaatagcatcagagaagcttttgaataccacctaactgcattatggccttataggtcgaaggaaccaatgaaaataatggacctccattccacaccccatccttctccctctacatcaaacctacgcccgatttcgagtgagagttttaagtgtccacatttcttaagccacatttcgagcaaatcacgtcaattttggatgcttgtcttcatc

SEQ ID NO: 815 - DNA, 531 bp, Rattus norvegicus
catttattaagcctttattaaacacctccctgaaaggcccaggatgacaccaggacctttagttaggaccgagatgtaaatgcaaggacagcacagaccaaactacccgctcgttagttcaaatctgacatggctctccattcaaccagagtctcatgaacttgggagtactccggctcattcttcctgaaaaatctcaaaagaaaaccgcaactggaaacccagttttcaaaattgcttttaaaggccaacaacaagttggaaggaaaaggggcagaagaaataacctctctgtacatagtaagtctacacagactgccacagaaagccccttgtgtggacgttaccacctgctgagaccgctcccccctgcacggggaaggtcgcctcatagcttctcctcggttttaccatatactccagaggtatgtgtggggtttgttttttacatttatacagtttacaaagcttgaaccataaataacacttgtgagattaacagggctcagtaccgagtatgtacatagcccc

SEQ ID NO: 816 - DNA, 452 bp, Rattus norvegicus
gagggtcctaataacttaaaactttattaggaacagtagcaacatcctgaggtcacaggagaagatgtagagaagccacagagccttggcagggttaaggtggtaccgggcctgatattccaccctttcctgccccaggcagagaggccagaaacaatcaaaaccctacaggcaacctacagaggagtaggctgagacccagaactggcccccaacccaatagtccagatggacactgggaaaggatggcttcaacccccaagacatggcctcttttctggaaacatgcgcagtcacacagctgggcccttcagtgccatccctgtgctaaggcatagctgaggcctgtgttcgaggtggggctgagggcagccttctcagggttggagctctttccacttgcgcagtctctaatccatggcctggaatgtggccttgtccttgacaaaaca

SEQ ID NO: 817 - DNA, 734 bp, Rattus norvegicus
cacgtttttcaaaactgtattttttcctaaggcttttttatttgtattttattattcatgatcagtatagaagctcacaaaaacttgatgaggccatataaaaacaaaaaggaaaaatgctggttttctgttttagtgatattaaccttaatatagccaaatataaatttcatctaagaaacaagaaattcttttgagcactagtagctgctcgtatctgttgattataattagaagcaatacaattctgattagtcataattttttaaaagaaacttccttcatatctaaggaaaatattaggagtctagattaaattctatttggaatttagataataaccacttttcaacccagcccaaaattgttggattaaattaagtatgaactgtattttatgcagtcacgaagtataaatgtctactttgctttagggtggaaaacaaaagaaatcagagttgtggtttgttaaagtgaccgaagctctgaattctaccgaagccggttgctctaaaatctatatccaaagagtaggaaatgtcaaggttttcaccacctttatctcaactcaccaaagcccacatggactggagcagcactgtccacacatggctgtacagaacagagggaaataaatggccagcgccacatctcactaagcactaaagactaagcagaacccatagcctagttcagaaagccaaggcttcaggtcagatggacaaactgttctg

SEQ ID NO: 818 - DNA, 711 bp, Rattus norvegicus
  misc_feature (1)..(711): n = a or c or g or t
gtatagaattagctttattagactggttttacagaaagcagccagattagtttctctgcctacctaaaatacaagttacgtgcatccagattattcttaaacatgctgtagcaaagtctgtatttaagatgaattctaagactctttcttagagcaaagagaggtgctccatgatacatcccccgagggaatgttcatgcagtgggcacaatggcaaactctcttccaccaggctcgtcttcagtgagctgtgttcatccctgacctcacactggtaactccctaccccaggacagacttcacactacaacgttcacagcagcgcacaggtacactgctcgctgtgagaggatgggaaatttagcaagtgttaatttcctggcagatacacatacatagggagctcagtcctgccgggcccaggcttccatgcccaacttgaatggtgatggtgccagccttgtagtgtgaattctggtctctctgaccctgacctggccttcctgtgcccgactttcatcatctaacttcaatcctggcattttagcaattctaggctggttttgccaagaaggcaactgaataccagagcaaagcacgtacagtcccatgaggattatacacgtgaaaagactcanaacaggattacctagtataaaaatataacgataacacatcacaagtagagtataaacagtcctctgagtgaac

SEQ ID NO: 819 - DNA, 495 bp, Rattus norvegicus
tttttttttttcattgtttaatcacacaattttattagaattcagaccaaaatattaaaactataaaaataaagacactatttctctggaggtaactttgtttctcctttttatgtacagtggatccaaacttctacagcaaaaacttgctgcttttaggaaagacatacttgaagctaaacaacaaaaagcttgctgcattctggctggtaaaagctaagagttacccagcacacacagaagaagataaacaggtaagatatttatgataaagtaaggcagataggctttctttgaggcattagtaaataaatgaacttagaacttctttaaaagcgtaagtgtttaaatgcatagtattgtggaaagcacaagcgctcatttgcatatttacctttatacttcaccatgagaactccttagtgactgtcagccaatgtcgtaagctgcttttgcagtgtaaaactgatgtccatctatcatgtatatgccatc

SEQ ID NO: 820 - DNA, 626 bp, Rattus norvegicus
gtcttataaaattgttttattttattctatgtaaacttctttctcaggaatggtaccaaagtgacttgcttacagggatttataatttgggataaacataattaacaaaacaagtatttctctattgtacagatgaatgatctaaaacatatttataggctacattattcaaagaaggtaattagacttactgacaaagcaactttcctacttaagccttgcaataggaagaaaacaacggctaagagatgttctcctcggaatcttacagagcagttgggatgtttagtttcctccacacagagccaccaggattttttcatagtctcctttggtttcatccaggatggcttggcagagagggattccgtacttcttctggtaaaatactttgatttcattcatgtcaatttccgaacgggagaccataatcctgatcaatgtcttatggcgagttccagcacccttcatggcttcatacagtttctcagcaaagaaagctggagtgctggtggcacacttcacaatggttgtgaggcacttctcaatgtcacccttcagttccagatccaaggctttgttcatgtcatgttgactgtactttctataattctgaaacactttcc

SEQ ID NO: 821 - DNA, 551 bp, Rattus norvegicus
gaatgtagtatttattttgtgaatttacatgtgaagccatttacaaaagtaaagattcagacagatgcagctttcagtgcagtttcaaatatgttcacaacaagcaaaaacgtttttgagtattcggaatgacagtattgaatggcacatgcttcagtgtttcctacccaaccccaagaaggagggaacaggagaagatgtccctactaatgtaaatacaaccatgcaaataaagactcttaagcgaagggtcacattcagaggtgtaggacatttctgcatttagggctatcatcaccggagaattatttcacaacacaatggagagctctccaactgtccattataccagtcgtctcaaactatgttaagtgctcctattggcttaccagcattgtccaaaaactgactttagaaggagtcatttctagtatttcctaaaaagacagcatctgtagacaaaatcatttggtttcagtgggataaagcacccttttaaataagagtgtaaaatgctcctatactctcaacaatgtaaactataattagac

SEQ ID NO: 822 - DNA, 660 bp, Rattus norvegicus
aagtggaactttctctttatgacagatcagcataagcaccctgcggagtatttcttataaaacagtataacagtgatgcagaatgatctcacaaagccatcttcggacctgacatccgggctatagcctaagagcctttagcaagtgaccgatcaatcacaacattactatgatgctcattatttaccaggtaaacctgaaataaatcaacaaaataaaacaaggacaaaatccaagatctgccaaacgacgactgtgtttagtaatgggaaaaacactgaatctgagccggtccatctgaattcttgtctttgtccttggatggatgatctgagaggacagccttggttaagtctttcagtttaaattgacagagctgcttttatggttgtgtacagtctttttctaacaacgcaaacttggcaaccaattcgacctgcatataccatataactcctgtgccctgtgtcatctcagtcctcaaattaacaaacatcgtgtggttccttaccagacacaaactcgagagacatggtttcatgacagattacaaagtcacggaagtccgaagaaatatgagttgacctcagacatccttcttggtgaaacaatgcaaggacttacggagagaaacaagcgagttcatacattaattacacc

SEQ ID NO: 823 - DNA, 719 bp, Rattus norvegicus
attttaacttttttattgtttgcttattaaacatacattctcaaactgacactttgccatgaataaagcaacaaaaataaggcaataccataagatgtgctttacatacaaacatcatcctggaagagtaggaagtctgaatccatgtacaacaaaaaaagccaggaacaaaaagcactgtattctgaacacacacaaatgtgtatgtatgtaaagacagcacacacacaatacagtttacttgggttctttatgagcataattccttaatcatcctttggaagaatgaatcttaagaaataagaaatctgaactgcatttattttcacaatatcaatgttaaacttaggagaagcaacttcattgactaaatgttaaatatttcaagagtaaaaggcaaccttaatttttagtaaccctctaaacagggtctggaaaacagtaggttttcctctcttggtatgaacaaaggatggtaagcaagcatcattgagagtgtggacacatagaaaaccatcttgggaaccgtgctcttcacaagcctaagaaaccaccagaaataatgagtagaccccatgcaacccaaatgcaaagctaactctatacatgttacaattttcaaactcttgcttctaagacaattttagtacacctaataagtacagcaggtcatttagaaaaacagaaacaaaatatatacccagtctttgcaattcaaa

SEQ ID NO: 824 - DNA, 602 bp, Rattus norvegicus
caggcttaatatactttattgtaagcattagtgaactttttgattaagaactcagccagttgtgttctcagcaagatgccctaggtgggccctgactacatctggctttatgccagactgtgctggatttgccacaccataggtcagagagggtgtggcagacatctagtgctcatgattagagcttggaggtgctctgctcggcttctcaggtccccaggagcttcagtagcctgcattggaagcgagagtcttcaggatgtgtcttcaacacttggtacacctctacggggggcttcaagcccatctgctctgcccgatgccagcgctgcagccttgtgatacctgtgcaaggcccatactgccaggccaggtcaaactgcctcagcaactccagctctgtttcctcctggctgagggactgggtgtcttcccctagctcgggtgccagctcccccttgttgtgcccagggggcccctccctcttcttcacaacagggtaggagtctgtgatgaaccgcttccgacccatggcggccacccaggcaggcggagcaggaggcaaagaaaaggcagggcagcgggcctgtgagagacagctg

SEQ ID NO: 825 - DNA, 668 bp, Rattus norvegicus
aactttaaagactggatttatttggagaaaaacaaaaaaccctcaacccaaaggatgggattttacatctcaagacatctcccaagtaatgtctacagattacaaatcattttcatagaagatatttttgtacaaattttacatgtattcaggagcgggacataagtcaacccctgttcttattttaacagaggaaagtaggagagtgggacaaaacagctgtcttttggatgcaactatctggaagggaaatagacatgaagagggcaaactaccttctcactgtctacaacaatggtttaaaaacccattcaacctgggtatctctgcaaaagccctcctagctactagccaatcaaatccaccgaagaaatttgctgtgcctactgctgcagcacgtgacgtcaatgctcctgcacagcaggcctaggaacttgtgctaaaaccaaggtctcatctgtctgcaggtacctgactacccacaacagggaagcttgccatcctcggagctgagctacaaaggtgcacatcaagacaggctacagcgctgcacgaggaactcggaccctggccaacagttctttgcatcctcctttactctggaagggagtaaagacgccagccctcctaggcagaaaagcagtgacaactcaggcaccggtgtgggg

SEQ ID NO: 826 - DNA, 631 bp, Rattus norvegicus
cccattcaggaaggtaactttattcctgcatttcccccagtcgtcagtattctcagaagtggcacagacagctccatgctgaccttgaagtctactgtaggggccaacagcagttcccagggaggtgtggctgcacattaaattgtctggaggccgtgagtgttctttgggttcgtgtttctgccactgcacttgagagacaggccttgagctgggagagctctgagagactgatctgggtgtccatgtatcatctgctgagggaaaggaaagatggtgtggaccagccagtgttcttctacagcactgagccaatgagaaggctctgtgtcaactgtcaccttccacagcgatgatcctacaacaacacgctctgggatgagtcagcctctaagagggactggcacctcatgatcagctgaggtccctcttgttgaaagcacgcttctctcctctgtgcgtggcagcacttgcccagtaggagcaggaaaccctcgccaatggaatggaacgcctcctctgccgtttgtggcttctgcttcacgaggttactgaggagcctaaggcagaagcggggggacaggcattagctcctgagtttgcagggctgtcttactgctttagattctca

SEQ ID NO: 827 - DNA, 471 bp, Rattus norvegicus
gccttccatgatgcaaacgtaggtggaggtttttatgtccctctgctgtctcgctgaaaactatgagtgtgactctggggttaaagcatggcactttgagtgacttgagcgatgtaagctttctgaatatggcatgcagatctagaggaactttggtttaagattcaggaggtgtgtgaggattctggttacatacaccattgagtgagtagggacataacacaaatgcttcctaaactcatttcaaacacgtggtcaaagtggactcgaaatcatccaagctgctgattcgccccttaggccaacagctccccatttgcttattggtttgtttgcagctcttatttggatcaaaattgcccatcttcttgaaaatgtcatcctgctgagtcccacgcggcatgcggaaatctggatactacaggatgtgcttgtggctccaaggaatccttgctgcggtacaaaccactg

SEQ ID NO: 828 - DNA, 590 bp, Rattus norvegicus
cattgtaaaacttactttaatgatttctgtgcttttccttataagaataaaacatgacagctaatcttcaatgctgaaaaccagaggatcggacaaaaatcacatttatttcaccagctctgacaggtgcagatagagaattcacaaagctccgagaccacctgacatacaaagacaagggggtggacatcagaagtggggctcctcaatttaaaaatgccccaagtaacttgaaagtcgttaagttatagtattctatgtacatcacgtaggaaatgagccaatttacaagatgctgataaagatactacaatcaaacaatccttcacagaaagaatagtcctgaactggtcaaccgcagaccaggggggtttcagtcactcgatcaccagctgatatattcactttgtgatattttcatttcaagtcaattctaaaaaacaccatgacttaaactcgaaggcagacattattgttgagaattttctgaaatggccagtgtatgtaaaaaggcttaaaaggcaacgtcaacttcagcctcgggtggcgtgaagtggtgagttgtacattaacacttcctcgggttcctg

SEQ ID NO: 829 - DNA, 730 bp, Rattus norvegicus
gggttttaattaaataaacttttattttagaatgactttagattcacagaaaagttgcagagaccaaagggttcccatatatcttcatccagcccaccccagagatatgattacaaactggaaggtaactaagacccagacagtatgagtcctggttgacctgctaaagtgctttctctccctggtctctgtttggtcctaagaatcaatccagcaccacaatacactttattcctttcaatctcattctctgggacactcagtgggtggggaagctggtgacctcactattgagctgggaagacagaggcttgaaaatgacaagcgtagcaagtgccacctcaccctgctgcttccgttgccttgtggactctgggtttgcggaagcccctctgaatgccccgttatccacctcattctgcttatgaatcatccttggagtggggtacccagctctagaaggcaccgtgccacgacttcttctaggttttaagaaccttacttaaaggctgacttggcccctctgtgtgcttatcaataaacttgtgaacgggagtgcttatgtgtgggagtgagaaattctgtctcttgtccaccaagattcatctgtgatgaaagatggccccacgttctttatagttcctcccattgagagctgggtccacttgcacccctggaatctaaggaatgaactgaccagtggagacacagtcctagcaccggggcttga

SEQ ID NO: 830 - DNA, 609 bp, Rattus norvegicus
tgccattaagttcagatctgaattacatatggaaaacaccgctacttgttatcactggaaattatgtgtagacatgtgaccaactgagggttatactatagtcattaaagaaaaagtcaagaattttgaggacttaagtgcttgtagttataaagttttgttcccttagattttttattacacaaatcccaatagataatatacatattactacagattgctatagataacatcattcaaaattattaaattagctgcatattttgaactactcctgatgaagacaaataaagtttagcattgataaggcagccgagagttggtttggggattcttggctattcaataatgttggcatggtcattaaagatagtcttccgtgttttcccctcagcacgactattcatgctgacgtgatctgtggccgcaacagtggctggagcactgtccctttcaagagctggtccttgcactgctatgcaaatggccgcttactcatctcgtagttgataagtcgtcctccctgaatgagctgagcgacttcgtttgtcacatggcacgcaaacagaagccagtttcggggttgtacctttgtggcaaatctcatga

SEQ ID NO: 831 - DNA, 610 bp, Rattus norvegicus
  misc_feature (1)..(610): n = a or c or g or t
tttttttttttttttttggtggtgcacgtgtttaattctgccatttgggatttaaaaaaacaaaaaagttcaggccaaagcttgtacatggttgtctataactcaagcaattggaaagctaagaaagtaaagtgtgaggccaactaggatacacagtaatgttgaggctaccctggctatgtaacaagatgctctcaagaaaaacaaagagaaaaaagagaaggagatggaggaaaggaagagttaccccagattccagatttggaaaaattggctttgtgtgtgtttgtgtttcttgtttgtttgacatagatcctcatacacacgcaaatagaaagacattatccaattattttgatgtggctaatggctgataaattgtggttttgaaaataacaatactcgtcacatgagagaagagttaatttggagtgaaaagacagccatgatatacacaatgcttacctgtggaaggcagggctttgaactgagtaagtgccatagtggttaacagtcctgactccagnggaatatgcattctaaaccatgtcagttttgttaagttgcatctgtctttgttgctattttgaaacataccttactatatagc

SEQ ID NO: 832 - DNA, 430 bp, Rattus norvegicus
gcttttcttcagggctagcagtggctgtcgcggctgtgtctagcgagtggcagggagtcgcagaagcacttactatttcgttaaaacatagcacacttcttcctgctcatcaaaggggtgaggaaagactgtttccaggcagtgcaaactccaccgtttacttgtggtggtgcctatgccttgtagttgagacacccccacctctcagcccactgggcttttgtgcgttttccaggagtgagtgacaagatgctgatgggccaagactgccagaggaccctggacacaagccaaggcagctcagcccctagcagctatgctaatcacaagtgaggctacccagactggtggaggactgatatttggtatcaggtgggtgacagtagggaaggggcagaagggaatgaggaattgaagttctgggatccta

SEQ ID NO: 833 - DNA, 382 bp, Rattus norvegicus
tttttttttgttggcagtgatatttattatactgacagatgggagttatatacagcagtgacaagatgcccctcaccctaccagggtcttgtgggggaaaggaggaggtattgacagaaggcacatggtggtagccccaggaggccagaagtaaaggtaagagggtgtagtgtgtcctggggaacccagaggttgaaacagaggctcagtcagagagagccttgggccacacagcaagtgtgaggcagctggtcccgagagcttgtgctggtcacttgaggctacagcaggacacaggggcacctcccatccttcttcctaggggcactgggtgggctaggagggagttcttgctcctggtatttccggacagtccgcacca

SEQ ID NO: 834 - DNA, 563 bp, Rattus norvegicus
tattctaacaaaagtataaagtgtggaaaattagtgtatctgaatcatttcagaaagtagagaagtttccactagcagacttgagatcttagcacctttgagaagacagttaagacaactggtactgcctgccttggatgacaggtggctgctcatctgcctagtgtccgtcgtgtggttcctgtggccagggtcatttggtttatttctctacattttgggagtgcctcagaacaacttaaagaggaggaaggtatccgcccaacatagctggtggtaagatggactagaaacgctggaaccggaggctgaggcagtcaggcggtcagatggacagtccgaaggcactgacgatgcagtacatggtcttgttctcccatcggactgtgcagctcccgtccgtggagctgtcccagaagcaggaacttgcggtgtgtaacccagcaccattcttctgcatgatcacacaggtcacaatgtatttaaatggtttccccagtttggtgagttggctcaaagtctgttctacaacattagtggtccactggttgactttgctgtgc

SEQ ID NO: 835 - DNA, 421 bp, Rattus norvegicus
atctcttatttacaaacactgggtaggacacccaaacaaacaaacatggaataacttacaaaggcaggaagctgtttattatagacagtaatcagctttcatcaaattaaaaaaaaatatatgtacatacacagttgagagaggcaggccaggggagttcatccgcaatctagcctggtactcacaagcctccctccccttcccagccctccctgctttgtgttcttacggagcactacagaagcaatctacagtctctattgcagtttgtaagcccccacccaccccccttaatactgaatgagatcgaatgttaggtccatgcagttcttggtcaatgttaacgaaaagtccatcgttctggtcgcgcgggcacagcccgttcgcaaagcgtggcggtcaacaggccgctgctctctgg

SEQ ID NO: 836 - DNA, 653 bp, Rattus norvegicus
attgttacaaccaatgtttatttacagaatataaatctcttcaaaaagatacattccttcatttaatcaatggtagaaagccttattaaacagaaataaagcctaagccgcactttatctcagaagaagattgcggcttcattgcaagttcatgaacacagaacacaaatgtacttcactcagcagctacgtcaatgaggctgttgattctcactggcaatgccattttatacatggaacaaatcttacttaaattaacagtagtaaaaattaaacttcaaacataaaaatatgtaacaacgaaggaaagagcaggaagtacgtctgctagcaaacaggatacgcaagttctccgcactcagacactcggtgaggcgtagggaaacctagctctgagtctctggccaggaagcctgtagttccaatcggatgggctttcctgctccactttcacaaacggctcaagagacaatgtggtgttttcagttctataactacctagtgttttattaaaacttactgaagggatctaaaggacctccatgggtaagacaaccaaaagatgaaattataactattttaaagggtatttttgcaagtacatacgccatataatgcacaacggacaaagatgtgttggtggtaccatcatg

SEQ ID NO: 837 - DNA, 425 bp, Rattus norvegicus
gaaaaaaagaaagaaaaaaggagcagttaactccttttattttctctgtttaaaatcaaacaggaaacaaacatcaactctgttatacactaacggtcttcaaagtacatcatttgtacaagagaaggactaaaaaccaaactgtttacagagatccaagcacgagtgagagagcacactccttacacggctttccgatgatactcaggaggagccacttcataatcactggcactgaacagagttgcagaattctttgccaggtacttgaggaaatcatgtagatagttcagtaataaagcaaggcttttctcatctagaggtgtataggccaacatcgctccaattcgcacaaacaatctcagtaagtgtggcgctccatacacctgggacatgggtgcatccgggtgatcggccaaaatttc

SEQ ID NO: 838 - DNA, 469 bp, Rattus norvegicus
gaaaaaagccagcataaagcacttttattgcaataataaaacttgaaccgcatatgtagtgcaaaggcaggggacaaaagctttctctcaccaaatcactacacgggacagcagagggtgaaaaggaactgaaggaggaaaagccaggaagctgggatcagcagagagccaagcatcaaaacctgggagatgctgaagctgtgatgaccagcatcattttcttagagaacactcaaggatttgttgtggtggctgggcatccactgggtggtgagtctacaaacagcaccttcagtttaaactttccaccgaagttctagaatttagtaagtggagcgtgatagttacaagattacaaaagtccagaaaatccattagaaaaaccataggatgaaaaacaaattaagccaggtcacaaagaaggcttcaaaggtccctgccgacccagggacagatattgtagtgttca

SEQ ID NO: 839 - DNA, 430 bp, Rattus norvegicus
ataaagttttattaatgacaaatatttcatgattttatgggacgttagatacaaagttttttacttcagtgtttgaaggacacttgttcagaagttatccaaacatatgggaggttagtttggcatacatttacagtattctagaaactggctgtcaagtgtgccagtaagtggaggcacttgggctttacatgccattgtaagcaggtcctcctccaccttctgggaccacccagttaatattttgacttgggtctttgatatcacatgttttacaatgcacacagttctgagcatttatctgtaaccgtaagtctgggcatcacagctggccctcaaatcaaactttttataaagctgcttggctaggtgtccatggcagccttctgcaaagattgtgactttggcatgcaactccaggcctcgtgcc

SEQ ID NO: 840 - DNA, 370 bp, Rattus norvegicus
caagtcaagtttttttattttattgtcagttacatgctttatagaaaaaagtgtggagaaccggtcagggttgtacaaaaaaaggctaggttcctacgttgttttatttacaccattgtgaggacgcccccacttcaggcgcagcagctgcacttgtccgaagcctctttgcagatgcagccctgggagcacttcgcacagcccacggggcagcaggaacagcagcttttcttgcaggaggtgcatttgcattgtttgcatttgcaggagccagcgcaggagcaggatccatctgtggcacaggagcagttggggtccatggcgaatggaggcggcagttggagatcaacgagagatcgctcctcgtgcc

SEQ ID NO: 841 - DNA, 590 bp, Rattus norvegicus
caaagaaaccaccgagatgtttatttatacaaatgaacagggagtgaaggtaggtcacgcaaaggcagagaacttttaataacactgtatgaaatccccgaacaatggtggtatgaaatgttgcagcccgggggccacagaactgttctcattgctttccctaaaataacactacaagaatgtgtcctaagaaaatggctgctcctgtgtgcagccccaggaaagcagtttaaatgaaccgaggactggtatactcatcaggactaaacacactcagataaaatcatatggaaagtctttagagcacacctaaataaagaggaaaatataatataaaaataaaatccaaaatgaatgcaataagatggtgaacattatgggcattttaaaaatctacataatttctccagcattttcaaacaaaaggaaaagacaggctactgtttctagaacttgcttgctttttcataaattctactctcttctatgacaagagtgtagacataaattttaaattgaaaaaagaaaaaaaggaaaaaagcagcccctaagctgtgtagtctattcagatttgagctgttcatgaagac

SEQ ID NO: 842 - DNA, 630 bp, Rattus norvegicus
gtagaagaaatatttaataaagaaatacagttcaaatacttaaaaataattatgtaaataccaggtagacatatgaacaaagatgacttctgagttaaataaattaaacagagaactataccaataaataagaaagtcactggctgaaaacagtcaagattttatttttcaatattatttcatttggaactcctagaataattttctccaaatgaccactctcctgtacccagaaagctctggccagggctcctagactttgctgcattggtcctgagacttctagactgcattagtgcttctggctggtttgaaaccaaatttcactgttcaccagaaagcagctcttaatgcattctaattctgcagtcaagttacttaacttataggcagggctggggtgagaggggcacttaaaataataaggtcactctaagaatgttcttccctccattctcggttgacacatgaatctacagagtaaatataaccttcccctgggtgcaaggctcaacccgaagcttctggctggcctacaggattcagagccaaggacactgcctaaaaagctaggctacagatgtagctccaggaacctcagccaatgaggctttgccaacctgtagtaga

SEQ ID NO: 843 - DNA, 715 bp, Rattus norvegicus
  misc_feature (1)..(715): n = a or c or g or t
gactgactacaaagactttatcaaattattgaaaatgttggcatttaaagtattcatgcgcatacataagttacatggaatcttcgggttgtaggagtacaaatacgatggtacacactgtgagcctggcagtgaagcaaatgaaaccagacttaaaacaaaaaaaaatcggatgtcctagtcaggcatggctgaggcagagggtcaggagttcaaggccatcttcagctacatagtaaggtcaaggcccatgtcatctacctgaaacaccatctcaaaaaaatttttgtgtgtgtgtgtatcttcttttacctgtaggacaagggcagagggggcaccatgtggggtggcttcattccactgctcagatttccccttccaacctctgggagaaaagggcctggtattcccactatgtggaaatcttgatatgggaaacaccaagaacctactggaatatgtccttataaatatatttatatcagagaaaacaaggcactttggtaacatgatagctttctctcctatgtgtaaatcattctaggcagaaaataaaaattggttagttcctcaggtcaattaactgaataaagttaatacaggaacagaattgtcctcagccttcgctgaggccccactaaagtgaacgaggcangaggcacagaagcacttctctgtgcaacacctggtcccaggtcggatgggcaccagccaa

SEQ ID NO: 844 - DNA, 658 bp, Rattus norvegicus
caatacacatatttattatgctgtaaaaagcaacactacctgatctcatttaaaataagtatttcccaatttcagaatacttacaatttatagttttaagatttcattttgggaaatgttagaagtaaatacattcatagctgtggactccccagcagggacctagggcagacatcggttatcaggtccctgacagacgtctggatcgacagtgagtccagctctgccgctaaagcagtgtaggcagtagtgggcgtagcacatcagcagacaggggcgtcagaaccgggacagcagggacagcggtatgcagagatcgttgaagccacacgatcatgtaatggttctgagagacagaaccatcacctagggttgtaaagccagaacagacgtctttggagtttactgatggcagcagtcagcggctcattcacacacttacagggtccttgctgttatcagccagcagcgaacagccagagcaagacctggcccaggacaaagagcgcactcaaccaagccacagagacagtatgaagcagcactgagctgaggagagatgaaaacatttgtctcagataatatacaagaccattatcggagggaatccttaaagtcactggcaatatttaagtcacacgctgaattccggaaagcc

SEQ ID NO: 845 - DNA, 678 bp, Rattus norvegicus
atctcatctgtatttacctttttaaagcagaatgtgattgggcactgttattttcacattcacaagccttgctgagttacaagacctaggggaacttagggttttgttctcagtactttggaaaacaagccacttggggaattcctgtcaagttgttttagcttgtgtttacttctaagactagtacatgcagaattaactacagggaatgaaaaaaatttaagatgaaacttaagtcatcttaatttggtctactaaaggaatccagctcaacagctaaacacttcagaccacatagttaacagtaacagtaggttacattacgtcttacaacaaacgttctatcaacctcttgagtcaaacctatagtatcacagtatcacatgtagaaatttttaccttcccctagttttcatgccacacagatgttttaaatgttaacaaaaataaacaaaaatcatggaaaatatattatcagaaggaatgaaggtaagcatcaaacacatagttctggtgaagcctagtctacttcttccatgcgtgatgtgtcatcatctccttccaggggtggcatttcttcagttacagcagcactggtatcatccacagtaggatcatcctcatcaatacctagaccaagcttgatcatcctgtagatcctgttagcatcctcgtgcc

SEQ ID NO: 846 - DNA, 632 bp, Rattus norvegicus
tccagaatcagaattaagcattaagtgtccaatattataaagctgtttataacaggagttttaagtagtggtaacatttaacccatgtaaaaatgtcaacagaatttaaatcgtgacttggatcctgaacgattcaagtaccatggtctcactcagagacgggtttggtcagttttaagatgaactccttcggatgtagtgtccgtaagtccttattatcgctgtccatcaattcacgataggatagctggctgcggtggcaagtccgcagtggttgttccggtctttggctattttgatgtagccatccataccccattctttaccccagctgtttttgacaagccagtatttatccttatttgaatctgttccttcataaccatagccaaccaccagaaccccatggtcgaggtccttgctgctacagttgggttcatagtagatacctgaactatagaactggagagacggatggcttgcatccatggcaacagaaataggccccaccgtcgctacagccttcatgagggctttctcttgctgagggatatccacaaaccctgtgtcgttagccagtccacagtctccttgtgccgaattcttggcctcgagggccaaattccctatag

SEQ ID NO: 847 - DNA, 700 bp, Rattus norvegicus
catgaaaatatatttaatcttattcaattagaaatcctgtctcgctccccggttactttcaaaccctgtcaacaaatgttgaaaatggtaaaagacaactcacggtgattggaaggtaggtaatcaaacacttgggacggccgacctagccacaaggtcttcgctcacttggaaggaagggatcacacgattactatgaatttgaagtgtgacagagtctgaagctatgtcgttaacactggtgtgatacacggaggaatgggctctccagggaagggtgtcactgagcacagacagacagagtaacagaaagggtaggagacacttctgagatactggctagttctgctgaagattagtcagagtgaaaaaaatcaatgaccggtgatgagtgactttaaagagaaggtagctctctttgggactatggaccttcccatgattctagattccggattacagaaaaggataaaaagattaacaaatcaccgaactagagactcctgccgctgagcctccaggaatggcagggcccacttgctcatcttgctagcaccctcacgagaagtagaggtggctgctcgccaggcctccaccagcggaggcctggtacctcattgggtctagcaccaagcgcgggtctcctgagaggccagcacctactgggccatctttcggatcatgtaattcaggatgcctc

SEQ ID NO: 848 - DNA, 604 bp, Rattus norvegicus
gagcagtagtttccaacttttatttgagaaaaacagaaagtacatgtatcaaaagagcattcaaattgacagaaagggagggctggtgacggctactggggatgggtagcaagctgaaggcttctacttggctccagactgttccgactctgggcctccaatttgggcacgggcctcgaaagtgaccggaatggtgatctccgctgattgtgtgactgctttgggcagcggagccttcaccgtgagtgtgccctcaggggacagggaagaggacaccaaggtggggtccacacctggagggagcgtgtatttccgggtgaagcaccgagagatgtagccatgttcatcctgcctttcttcgtgcttgccagtgatctccaccacgccttccttggtcttaactgtgagctcctcaggagcgaagtggttgacgtccagggacacgcgccagcgatcggccgtctgtcggatctctgagacaccgctactgagttgccggttgagcgcccggctgaaggcgggcgcggccagggtcactgctgcggggccctcggcggtcgcggcgggcaaagggcgcacatagccgggccaaccagcggagctg

SEQ ID NO: 849 - DNA, 478 bp, Rattus norvegicus
aaaaacatcaccaagtcagatttttatttctacagacagaaggccaaaagtttctatttcagtagcagtgtacaccaaaccactcctccccagccaaagctgactcttctttgcatcctgcatgcctttgaaccatgcccagccttgtgggggtggcagcaggactagactgctattctgtgttccaaggggtacctgaaagcaagaatagaccaacactggcatccgtgggttcctcaggccaacgcgctcccctctgagttcaccattcattcaaagcctggtcttggccgtcagcaaaccttgagacttaaggtgctcggcgatttctcatctccctggaggaccttctctccctccgacctccattctgtactgcttgatcagtccagccatctgcaaatgaatatcacagggaagagacctatcgtaaccacgagaacacctcacggagactcacctcgtgccgactggtgcc

SEQ ID NO: 850 - DNA, 645 bp, Rattus norvegicus
aaacagttcacatttattattgtaacaataaaaaaatcttttaaagactatcagtattgtattaccaagagtgaggtaatatgtttacaaaacatttacagaatttgatatgcaaataatggttcagggaggagtgagttaagacactagaaacaggagagcccagagagtgcagggagcagcatgttaggggagtgctgggcactggacaagcagctctgtgagccacacagtcacctcacagccagcctccctcacaaggcagccagtgccctgtggcctggggaagctcaaggcctgtgaatgtgtagttgtgtgctttgagctcttaaagatgctatcagctctgagggggctgaacagagacacttctgaatggacttaaagggagcagctcttcagcctggggcatggctgcgactcagataggtctacaaacatccctgggcacatgtgggctgtcgagtgaagcgctttcttggaggttgtcagcaaaatcgccatctgggacatggagaaagggagagggaaaaggagagagaagagagaaagagcaggggcatcttcaggtcctttcgcttggagctggggagccctgactgaagcagtgtggacgcggcagccacaagcccgctgtgcgtgtac

SEQ ID NO: 851 - DNA, 536 bp, Rattus norvegicus
aaaaaaagtaagaataacaaaaacaaattttaacaaaagtcagggacagttttttcaagcaacaaaatcctggggtgaggaaagcttactctgaaggtgatcggaaactggtaacaatgtaataaaaatcgagaattgcatagcgctgcacgttcagcctttagcaaaacaaaaacagaagctatttggtattgatacaaatccatctatttgatagttagtcactcgttattatgtacatgttttatatactgaatgtcatttttaagtccccttgtccacactctttttctctgttggcaggttgttggtttgacaagcttgaacaaaaaggttttctggtgtttttgtttttcctccgaacgcactgcatcgatgttctctctctgagcagacgcggttctctgctacatgtcatccgttcatttaaaaaggaaacaatccacagtgcgatgtgtctgggatcaccacacccattgacacccaggctaaaccaggctggaccgatcggccccaggtgcaggctccttggccct

SEQ ID NO: 852 - DNA, 492 bp, Rattus norvegicus
atgaatgaggcaatttattaacccagcatcctttgttctaatgcttcttgttggcagctgccacctgtccggcgatcctgtccagatctctctgtccctgaggtgttagcttgcggcccccatcttggtccttttccaccattttcagcccctccagggcttggaggacccggcgggccacactcttagagcctctgctgaagtggctgggcctgacaccgtttctctgccgtcctccgtagatcttggtcatggaaccaacccctgcaccaccacggaggtacaggtgccgtgctgtggaagcagctcgtgtgtagaaccagttctcatcatatggggcaagctctttatgtttggccaacttgactgtgtccacccattcggggactttcagcttcccagactttttgaggaaggctgccagagctctgacgaactcctgctggttaacgtcttttacagtaactccaggcatcgtgcggcctccgcgct

SEQ ID NO: 853 - DNA, 620 bp, Rattus norvegicus
gtcataacctacttttattccatatttcaaatctttatgcatcaggaagttacagaagcacaacctagtcacactctcaattgcttcttgatacaatctgaaccagcagacatggtttttctcttatattaaaggctgctttttatttaatgactggatatttaggcaggtcatagtttatgaaaccatgtctaaaattttcatttccattcgtgttccaagaagcaaaaatttgtaattgttagcaaaggtccaaccgcggaggttccgttcccatactggaaaatcaactacatacataatgctgcagactgtacagatgtacacactggagagctccacaggacgtcagtcagagtccactgtcggtctgagagaaccagtgagttagtgtcccgatcaaagcccaagtcaaattaacttttgtacaggcagttctgattgtgctgatccaggtaatgcaggggtggcaggttgggtgaaggtaagattttgcttttattttcaccaaatgctgtctcacttgatttaggagggcttgggaatacccaggagttatcttccagagaatttctcccgtaggagttgtgctcctgaaagtctgcaccgtcattaggaga

SEQ ID NO: 854 - DNA, 568 bp, Rattus norvegicus
agtgatctatttatttttctctcttcccacctgaaaaaaaaatagtctcataaaggtctcgataaactgccactggaatggaaccagtcagtgattcccagagaaactttgaggagacagagggctgatgggtcaggaaccagggtggacttcctgaaggaagaggtctgagtgaggatggggaaagcagagggagcgaggcgggcgtccgggtgctggacccagcctgccattctagtcaggaaacagtaggaaaccagagaagacgctgtcagagccctcagtgcccaccatgccgttgtagtcgttgacggccagccacaccttgtcgcccctctgcagccgcaggagtactcctcctgagctgacctgcttgctgttggacatgtggtcgcaaaagctggtcaccttggcattgttgaggagcaactgcacgcacaggttggccgtctgggatgtgtggtggaccaagtagtagaggccgggcactttgcaggtgaacttccccgtgtttgtgttgtaatccccctgaggattggtgatggcggaattgaacttgacaaggcca

SEQ ID NO: 855 - DNA, 563 bp, Rattus norvegicus
atacaaattactgtacagtcattttaataaagtgaatagtaagtcaaggtagaaaacacgaaactctgatgccttccttagagacacagcaaagggactgtccatggccccggttagtgacagagtgaacagagtctagaaacaggctaaggcattgtgaatgggctattgagaacggaagtgcccagtgctaaaccagggcctgagtgatcaccacccaatctgtttctgtgggaacagggccaaaaatctctaaggaacctggaaatgtacagaaacgtggttacactaaacctggtctagcagtgctgtcctgcagcttctcccaaccctactgaagtacccatgatgcactgcgacagaagctctttaaagcattaatcagcggtgtacacactaggcgagtgaacactctgcttccagacacgtgaactggatttccaagtacacacagggcagaaccccgagtgcacaggcagggccagctgcgtgggctctgtaacccgatgtgcccgagctcaattcccgtgtacttactggttgttggaaagacgacaaaccat

SEQ ID NO: 856 - DNA, 636 bp, Rattus norvegicus
catcaaatacatttattgatttaagggggagaggcaatcttaattattctcagaagttaatatccttccttgtcatttaaatcatggctatttaagaggaactgaataatactggagctgttatttaacctgctgtcaggtctctggtagaaactatatgaatttaggaagccttaatttgccttagggcagccaagaatattgaacagatgataggatttagtgaaccacatagcagcaagtgatgccatgaagttgatcgaggaacgagagtacagaagaagcattccgaaggtacagtgaaacagagccttgaaatccatggctaagaactcctgtgagccagcagcacattggccagaagtgttcgtagaaactgacctggggcttaacacagcccctgtccagggacaggggagaaaaacttttctatgaggagtagtaaaccaaatcacaggttttttaattttaagtctcgctgattaaaactaagaatccttggcaatattttttaaccactttcttattggttgttccacacgtgcgtgcacacacacacatatacacgtccaagtgtgtgctcacagacgtttacacatgtactaagatacttcaacatcagttaacttatacatt

SEQ ID NO: 857 - DNA, 618 bp, Rattus norvegicus
gtattttaggccttttattttaataaataacttcagttaacagcactgtcaaaattaaaaggcacttaaaacaaggtggtgactagcttgagtcagggcgagcacagcagggaaggcacgtgcaggaggtgcacagtggtcgaattgctgctgaggggccctgcccaggccctacagtcctgcaagcagcaggacggcttacagtatttgtgaaaaaggcaaatgtacagccacagaaaagaaaaggttataatagagtctgacccccaaattgcaaacagacacattagagattagaggtgataaaggagcaccaggaattaaagaaaaacaaagcagaacaggcccctgctccacaatgctactaaagttatggccttatgtaaatagtgctaagtcagggactttttagcagagaagttcccagtacttttatccaagcttggatttataaagagaaagcgttgggagttacaggatcaagtaactcacaatggcacacaggttttaaagctaagttttcctttccacatctcagaatttttccaatggacttgtaaatcaactgtgtcaaatttattttaattggaaactgtcaacacacttgtcttccgcacg

SEQ ID NO: 858 - DNA, 520 bp, Rattus norvegicus
aggtcggacgaatctttctttaatacaaacttggtttatctacatacagggctgtcacccgctgcttctgcccaaaaaacaagcggggacgagtgctgacccactctcctacaaagagagacctcacttgctctagggggctgcgtgtcccccaagtgtcccgtagtcccgggggtcctccatgcggggcatggaggtcaggagaggacaaagaccctctctggtgcgccagggactggggcagtgaggccagccactgtgtcctggtggccatgtccctgcagcctggcccaggtgctcccagcacctcacccttcacatctgatatgtctgaagattgatttaaaaaaaaagtaaaaagggtaaaaagaaaacctacgtgagccattcacacggggacatgtgggaagaatgcacacagaagccatcaaagttgttgcacagagccgtcacacgacacacttactatgaaaaagttggcctcccacagaggcacaaacagtgatctcgtttgtttttc

SEQ ID NO: 859 - DNA, 601 bp, Rattus norvegicus
acactctacatgcttttattacaagactaccgagcatacgagggaaatccatcatccggtaattacatctaaagcacagatatttgaaaaaaaaaagaagttgtttcattaaattatatgattaaaccatgaccaaatagaaaatttatataataaagccaggaaaaaagttgtaaaatatagtttacaataattattcacattcaaggctgtacatcaatacatacaacgtggccccaaacatgaattcaatccaaataattcatatattagaatttaaataatacagactgaactagaggccgacaatagccagcaaataaccttatataagaataaaaatacaaaagtgtatatcctagtatcattgcattatctgttttcataagtatttttaatttttcctttgcctgtacatcacagttacagctacagaccaggtagagaatattacatatgttctaactgactgccaccaacctgaatgacagcaatagactattgattcatcctactgtacgtggctagggaatagccgcagcagctctaaatactgtaacaatttttgatttgtgccatgttcaatcacactatggtcata

SEQ ID NO: 860 - DNA, 454 bp, Rattus norvegicus
ggacgtggaaaccaggtatttaatattttcattaaattgtttcaatacaattcccaacaaatgccaactgcaagacaatgtccaaaaactctgaagaagcaagctcccagacaaggaacaaggccatcatcttccactctagccacaatacttctctccatactcgtgccagtcagccagcctcatccagattatcgagtatttaccacatcatcaattttcagaatgctccgcacagtttcagttgctagggtcaacgcactgactgacaccaacagaggctggacaaccatttcctccagaatgttggagatcccaccctttcggacattaatgcctgtagttttttctccttgggcatggcggtttcttagctctgttacagtagagatgggattcaggccagcattttcagccagtgtagatggaatgacttccatggcatctgcaaaaa

SEQ ID NO: 861 - DNA, 575 bp, Rattus norvegicus
  misc_feature (1)..(575): n = a or c or g or t
acagaatttactacaaaatgccataaaaatcgcttcaacttaagctctctccccccgtatccggcgagccaactggatgtctttgggcatgatggtgactctcttggcgtggatggcacacagattggtatcttcaaacaaccccaccaggtatgcctcgctagcctcctgaagggcaccgatggctgcactttgaaacctcaagtcggttttgaaatcctgggcgatctccctcaccaacctctggaagggtagcttccggatgagcagctcagtcgatttctggtaacgacggatctctcttagagccacggtcccgggcctgtagcgatgaggtttcttcaccccgccagtagagggcgcgcttttccgggccgccttggtggccagctgtttgcggngggctttccctccggtggacttcctagcggtctgcttggttcgggccatcttctctcacccaaagctgaagtctgaggcccttgctgggaccgacgcgccgctgtaagcgctcgaacaagcgccgcaatcgcagagcagaacaagacgaagctccttcaacgaaccctcgtgcc

SEQ ID NO: 862 - DNA, 491 bp, Rattus norvegicus
tttttttatttttcagtctgttgttttatttgttaaatggctaaaaagtcatcggggaaaacattaacaaaatgaaactgacagatttaaatatccatggaatccattttcattcctacactgtgatgtgcctaaaatgactattggagtgcgccgccgccggcacccctggttgtatgggaaacatcactcacagcaccagctttgccagggcacggtgggtgcacgctgacgggagccctggttggtaggagggagtgccaagaccactcctccacagttgatggtttcagtgctggccagagctcaaacattaaaatcagaaggcagggatggcggagtcctcatcccaggcaaggaagaaaggcagaaacaggagtgaaaacgaatgttcagcacatacatctgcatgggtttgcagttcatactctggtacaagggcttgccaacattgagggactgtgggagggtggtggcccaggcggcaagca

SEQ ID NO: 863 - DNA, 434 bp, Rattus norvegicus
tttttttttgaaaagttaaaaattccttaattttttattcctggtaccactaccacaatttacagggcaatatacctgatgtaatgaaaagaaaaagaaaaagacaaagctacaacagataaaagacctcaggaatgtacatctaattgacactacattgcattaatcgatagctgcacttttgcaaactgtggctatgacagtcctgaacaagaagggcttcctgtttaagctgcagtaacttttctgactatggatcatcgttccttctgtggcagatttttacagttcctctaatgcatttaggacgactgtctcaaagtaacctgcagctttcctgacaactcctcgctctctctcctgctaagaactgtagccgtttgttttattttaaaaccttctgctaccatatccaccacttccaccctcgtgcc

SEQ ID NO: 864 - DNA, 590 bp, Rattus norvegicus
acagtttaatatccaatttaatttttaaaaaacttaatgaaaatataacagaatcaaaacatttaaaataagtacactcactacccactccagcagttcatttaagtcataccaactatagaatatgaaaaataaattcagaagtgtaattactttaaaatacactgcttccacttttaatattttacatttatgtatatattctatagtggaagcagaaattctctctaaaaacattatcttcttaaaatcttgaggtgcatattagagccacaggcaatatccgacatataaaatcgcagaacaggccttcgggatttggcatcactggtacaatacaatgaccaggctacagaactgtacaatgcctaaacatcgcggaagaaccatgattctcttcagtggacaatgattactgcatattctacaagggcagtgatgttagtaattctgttgggtatatgtcctgacataatttccaaatgtacaacaacacaaacaactctgttaaggccatgttttatttgctgattaatggacaaaaggcaatgtaatttatttcaagtattttcttgaaagtctgtgctcat

SEQ ID NO: 865 - DNA, 605 bp, Rattus norvegicus
gcctctaacgttatatattaaaaatatcatggttcttgtgcacaaaatcccactgttcacatccaagcatcacccatgcctcccctctgaaccctagaacagctttaaaagaaagatggtggttttcctattcaagagctaaggaaacaccgctcagtctttatggaccttgaaaaatggtgaccccttccctcccccaatctctgcccctccaggccccagcccacctgggcagacaaagaactggcgggtagaaagtgccagcagccctggaggtgtggggtatctcaggcacagaagtcactcatgcctccgtttggagggtgggatgagatgtggaggaaggtcagcgggcagctcatggccctctagcttgaccttgataaggtggttggccagggcaaactcctcgtcatctagcaggccatccttgtccacatcagccagcttccagatcttccccagcactgtgttaggcagcttggacttcaccatctccttcttggcattagcgcccgtgatcttgccattgacaggagacagtgtgtagaagatctcatcataggtgggcttgtccttgccaactacccacttaacatcatcaa

SEQ ID NO: 866 - DNA, 402 bp, Rattus norvegicus
gccaagtgagccctggtttattgaccacattttacactccaggaaacatgtggaaactgaacacagagttttgctggaacatggtgtaagcagaatttgggcaggggccaaccttggaggagtcttatgtgggtcttccaagaaaagttaccatttttttccaaaaaaaaaaaaaaagaatcccacagtagggagaggtttaaagttctgcaccaattacgggttgaaagctgttgttcgtaggggccaaccagggccttagttggcctaccagtgaaggcctgagggtggggtcttctcgtccttattgctttccaaggagaagggtgggatccgaacattaaagtgggagccatcaggtctttcaaaacgaaatgtgccccacatgtgcccactggaagc

SEQ ID NO: 867 - DNA, 501 bp, Rattus norvegicus
agagttttagagtttaataatctggaatcttgggaacatatgatatggaagcttaagaatctagaactttggaccaaattttagattatcatcacatcacagcttagaaactccatctggggactcttaaagcttttgaatttcagagtctacaatcacatttccttaggaggcagaattttatataaaataatctataatcataaggcctcagaaactgtggttgaccatcactaaaatcttagaaattaaaaaaaaataaaggtttgaaattttatgatctggaatattccaacatgagccttaaactgttaaattggagaacagtatgccttaaaaccttcatgcctagaatctttagaacttaaaaatctacagtcttccactgatagaaccccgggctccagaaagataaagtctagaatcattgagccttagatcctggaatctcagagccatgcaacctaaaaccatgggggcactaccaagattttagaacca

SEQ ID NO: 868 - DNA, 535 bp, Rattus norvegicus
  misc_feature (1)..(535): n = a or c or g or t
gtgaaagtaaatgccttttattagtaggacagattttcaaaggtctttgtcattttgacaacaactgacagatgctctcttgggaacaattgaccattgcacaaagacaagagcaggaaaagaggtttagtggtacttgtgagccagggcactggccactccagccaccaccttctggaaggcagcctgtgcacagggggtgaattccttgcccaggtggtggcccaacacaatcacaatcatattgcccaggagctgtgggaagagggaagaaccatcaacataattgcagagcaaaaataccagacacttcaggctcatttcaaatggtgttttcgtttccaacttaaagtactgaaaaattataatgagaattcttctatgtcagacagaatttattgtaaaatatattcttctcttccactctggcatgaaagccaattactgctactactctntagagctgtgggaagaaacagggactcacatatcttccttgtcctcacctcgtgccgaattcttggcctcgagggcc

SEQ ID NO: 869 - DNA, 558 bp, Rattus norvegicus
aaagaaaatactttattacatcatgaaaaaggtatccaacaactagattcatacttgcttgaatctataaaaaaaaacaaacaaacaaaaaactgaaagtttattcattagactgtatgtggggtcatgttccacatgggaacagagaggcacaagggcttctaagtattgcacagtcttgaaaaaaaaaaaaaggagttgggaggagaagatcacatgatactgggaacgtctcacattatgagaaactaccaagaaacattcgaaaagaaaaccctctgtttctacagtagctttagtctgcagttcttggaatgactattccattgaagacatcttagtaacaggaagcttcgtttgagcaatcccatgtgcaaatattaataggaaaatatataaaataatgcatctcttgccatcacccccggcaattcaggaccgtattttggagaactgttttgtttgacactcggttaagctgtgagtttggcctgaagctccatctctgctgcctgcttgagcgcaacgtccaccaggagctgaaatccactaaaatcc

SEQ ID NO: 870 - DNA, 578 bp, Rattus norvegicus
agatgaagtcagatttattgttcatcatcatgtcatacaaaaatctacaaataatagatgtgtacaggaaaagagcccaaaggaatagtaaatggaggtgtaacggcgataatttaaacttgctttcccccatatattaggatgacagccatttcaaagcatagttgtgatgtcaaggcagcttttgctcgcccaccagagctggccgtttagattgaggccttcagtctcacagttctactgactcttgacaaagcttttgaggtcctcaagaaaggtgatatattcctggtgctccagggctgtgctgagctccaccaactcatctgcaaaagtgttatccacccctcggtccgcaaggaaatccattaggtggtcatacaaggcccagtccagggagtctgtgttgagtgtgtagtttgtatccctccactcagagtcaccagtggtctgaaagctcacttccttaatagagaaaatgtcactctcggcctcatcttcgtgtccgatctcgtcctcaggatagtggcagtccagtacaagggcctcgtgccgaattcttggcctcgagggccaaa

SEQ ID NO: 871 - DNA, 510 bp, Rattus norvegicus
gttagggcggcggcgaggtgcactttataagttacaggccaggatcccgctcaggctaattatggctattggagggagagggtgctgggaccagcttttttttggggggcgggggggtcttcaaggctagtagtctagaaggagcagatgcccgatccagccgagctaaggaccaccacctttgagctccaacctgcctatggccctatagaatccaccagcagaaacagtggctacagcgagaggtcagcagtgaccggcagtgggggtccaggggggcgccggcgagcacttcggcgtcctgtgtctgcacggatgtagggctggttccgaagatctgtgatgatgtcttcaatggccccatctcggtcactctcatagatgagtgggtctttcagctgcttccgttttagctcagagatgaggtccatctgttgtcgcctggccttgggaggagacttgggtgctggaggctcttccctggctgaggtgtcccgagctgcttccttc

SEQ ID NO: 872 - DNA, 488 bp, Rattus norvegicus
tgcctagggaacaataattgtatattcagtttaacagaaataaaagagtatttgtcttaaaatgcaagattttgagccatgcaattaaattgttaaaaaaaaatttcaaaactgaaaatcctttgctatttaagggctggaatgtttcagctttttaaaggaaagcagagatgtatggtacagctcccttgcaagaggggattcagattcacagttaacatgaaaatcatgtagcagacgtgtgtggagcattcttcgtacactggtttgcagcagtgacattcacacagatttcccagcgtcctggtaagcccgtgtctgcagccttaccttcccacatcgtggaaatacaagttcgcacatatacacagcatgatgatagaaaacaagatatagtaaatgagattcctaaatttcggttctaagtctcctttgcgataccagtagataagtatgcaggcagtaatactactcaaagagatgcagac

SEQ ID NO: 873 - DNA, 360 bp, Rattus norvegicus
gaggggcatgtcattattttaatgatgtaaatctttggggtctccctcattagcagtaaactgtcccctctcctcccaccacaatgtttctatgatgagtgacaaacaaaaaggaaatcacattttcatactaaaaacaaaatgatcaaagccttgatttctccactaaaaactacacgtacagttcaggattccacatgcaacacctcaagtcacagaccaagaccttacattctgacctggaatctcctccctccaaccttgggctggctttggcctatgcttaggtaatactgacacccataggtgctgcacggagggtcttgtggaaggggggagcttggtggacatgctgggggc

SEQ ID NO: 874 - DNA, 552 bp, Rattus norvegicus
aaagcattagtatctttattatggcataatgcagtactttatacagtaattcattttaatgtaaaaacattttatgtacaatttcagagaaacaactatatagacagctggaacataaaaacaggtaattcaaaagtccagagttacttgataaactggaaaatattttctctgtagaaaatagtaaaaatgataacatttcccactaagcccatttaagccaaataagagctgaattatacataaatattggatagattgtgtgacccaaaagaaacttctcttgctttatttgaaaagccatattttatttaaattgtgtcaattgaaattctttccttctttcccttcactgtttggttttccgcagatcattttttctatagggtaacccattaattcaaaattcaaaaggttttagttttaggctgtcctcttggaagtagagccagcatgtccttctaccatcttgaaatggcgaattcttacccaatagtgaaatgtttcattaaatcatgcccatatttattacaagccagagagtcgtcaaca

SEQ ID NO: 875 - DNA, 618 bp, Rattus norvegicus
caaccacagaagagtttattactccaatgattcgcacagctgggttgcaggtctaagggttgcctgccttcctggaggcactcccccacttccccctctgggggaattacacttggccatggaccccataaacctctgaatgcatttatttagaattttggacatctgcgttatttccctctgaaaatgctaaccaccgtgtgctgcccaccccacggcctgccagtccagcctgcagagggccattcacgctgccttgtaattccgaaataaatagaattggtagcaagtgagtgctgagtgatgtcaggatggccccagcagcctccagaggggcactgtggggacagtctcaaggtgtcttctgatgggcgggcactgtgcagcgtgtggcagtaccaggctgcctacagtttgtccaggaagttgtccagcgctgggatgccctccttcaggcctttgcgcttgcgggtctcagctacaacttggctggggcggctgctgttgtcaaaggggtccccaggcaggatctgccagtggtcaaacacacactgggggaaggcctggccaccagtgttggatcgaaggtcggcagtgaagccaaaggattcattgaca

SEQ ID NO: 876 - DNA, 472 bp, Rattus norvegicus
agctgatgaagctctctccgagaggccctttattaaaaccaatgacagtttcaaaccgtcttccaggcttgggacagggacatgaggcaggaggggtctttctgtatgtggacaaaagggtatggggtctctccaagcccacagctcagtcgcatgtgctcaatggtgggtgcccctgcgggcggtagatgtagtcttgatggaataagttctgaggactccgggtcccccactaaagctcagagcgttgcttcccatggttcccccgatggtaagcctactgccattggccccagtggaattcacaacagagatgttcacaggttccattccgtctccagacaacctgctctcctcgccctccagcagcttcctgtaggtggcgatctcgatgtccagccccagcttgacgttcatgagctcctggtattcgcgcagcagccgggccaggtcctgcttggccttctgcaga

SEQ ID NO: 877 - DNA, 513 bp, Rattus norvegicus
attaatttcattttaacattttgtcttcaacaattccagagattggtatgagaatgaggataattgaaaagtagctgatggaggctagttggccaataatgataaatgggtgttctactggttggcctccgattcatgttaagactaggaggttggctactaggattcagtaaaggatttgggtgattgggcggaatgttaagctgcgttgttttgaagtatgcaggaatggtaggaaggctaagattaggattgataagattagggctacgactcctcctagtttgttgggaatggagcgtagaatagcgtaggcaaagagaaaatatcattctggtttgatgtggggtggggtgttgagggggttagcgggtgtataattgtctgggtctcctagtaagtctgggaagaatagtactagggttattatgaataatagtaatataaatacacctaggaagtctttaattgtataatatggatggaatgggattttgtctgcgttggagttta

SEQ ID NO: 878 - DNA, 261 bp, Rattus norvegicus
tcggtgctcgtgtaaggtttttcttttcccctcaaattttatttcaataaaaggagacttgggcgaggtggattccccatagccggattctccccctccccccgagggtggctaatgctatctggggatgtcttcacagggaagagagaactatgggtgggctcctgcctgaggtctccaccctcagcccagcggacatatcacaggcagcttaaaaaaaaatcctaaaaaaaccaaaacacacatttaaatcctcgtgcc

SEQ ID NO: 879 - DNA, 631 bp, Rattus norvegicus
tgtgtcatttattaataaagcaaattctgctggtgtgctggacttcggaggcaggaagaagtgctgaagggtgatattcttcatttcatttcacatccagccagttgtgttaaaaacatttcctccttcctccttttactcctcaccctgaccccagccccagccagctccggtgggggctcagtcctccggagtccaggagattaaggctgctgtcttccctgtcagaaagacaggcaaagccctggaggcaggaagaggacgaagtgaagggctcatcaggcagggtgggtcggccctgaagccagccttctgcagcagtcagctaggcagctgctgtgtgctaaatacaggttgaagtgaggcttctgggagctccataggagcctaaccaataaactgcagataatagagaaaggtggctagagtcctggtccattccacaggctgtaaacttcttggccctagattaaattataatcccaaggagcaaatgcagaagagtgggctcaaagatcaagtctgcgtgctgacctcctgaacaggcacatgtccttgggcgtgctgtggtcgtggaagcatggtcaactttgaggattaagtagcttaatgcctcgtgccgaattcttgg

SEQ ID NO: 880 - DNA, 632 bp, Rattus norvegicus
  misc_feature (1)..(632): n = a or c or g or t
tacaaaataatttattacagcaaacacagcatcacaagactatgtacaagcacaaagcacctgactaccctattaaggaactctcttcttcccccttgccttacggacctcttctatcaggtcttttagatactgaatctctttggcgagagaatctgccttctctttcagagcctcgttcttcttttctagctctttacactcgccagtgagggcttcctgctcagccctcttcttctggcggtacctagtagctgctgtcttgttttgctccatctttttcagcttcttatccaacttttcagtcttcactttagctgtcacactaactccaggtgggtcataaggtttgggtcgagaaccacgaggaacacctggagaaggcagactgtctggtggggccctggaggtggaagggctgtgttggggagagcccaggtaggactcagggctcatacagatgccactgtcactatcagagggagtgtcttcctcctttacacactgaagggttagagtaatataagcagcagagtcaggcttcctatctccttcagagatatcaacctcacttcncagctctaaactaaaggaatgatctggagtggaagacagaaacctggggaacaagg

SEQ ID NO: 881 - DNA, 541 bp, Rattus norvegicus
ctggaaggagcactctatatattttatttccaccagttacagtgttcacattttccaagatcagtgtatgatctttgaaaagtcattgatctctgcaatataatttcatatcatatattactatgatttataagaaatctgtgaagctatttttatatgtgatcaaaccaaagtatgaattttgctaataagatcaactttgtatcacgtcatagaattatatattttaagttgcttaaacttttaacccgtcacatcacaatgtaattttctttagaaaaaaagagtagctggtattcatgtaaacagtacatcatgagatgcaaagtttgataatccataactatcactccaatgtacacgacttaaaaatgatactagagcttacttatcttacatgtaaagaaacccacaaatctgttacaaaaggcagcagtccaggctaatgtagctggaatcaacactgtggctgctgtcaatttcctagttgtttttaggtttgaagttgattttgccaaggcagacagcaaatcctcgtgcc

SEQ ID NO: 882 - DNA, 357 bp, Rattus norvegicus
cagattgtcaagacatttaatatttggagagaaggtgagacagcccggtgttgatctcaggacaggggtttcagagtcctcgaatcacgagagagaaacctggctctgcccagccacagatggaaaggaccatccatcccagccacccttccagactctgtctccagcgccacctcactgagacttagtaccttgggctcattttttccttggctcatctctacatttttccttgcattgatgtcccttctcttcccctgacagttcccagaacgaaagtggtgtcattacggaccagctgacccgggatgaagcatctgtcgtcctattccatggatcaaagaattgcctcgtgcc

SEQ ID NO: 883 - DNA, 668 bp, Rattus norvegicus
ggttattgaatatgtattttttaactgaaaaaatcattcataaattaacatacagaaatgtacaaacacatgagtgaacaatgtaatgacaaggaccatttctgtgaaaagtgtttttaaaacatctttaggcttcagtgcaaaaatgtccccctggcacctttaaaacaaagagcaagctcagaacaaagacagtaatggtggctaagccagtggcgtcagtgcctcgtcgatggtatgcacagtcagtgtgtgctctgccgctctgaggaaggaactcgatgacaggagtccccattttagcaaaattaaagttttgcaaatcccccctccccaaagaaagcctgtgcggacagagaccttgcacacacagggcagtcagtcaagggcaggtcggcttaagggtcactcgtctgtagcatggagtaatttcagctgccaaagtacaccaaggtcacacttgattctcaatgtcattttctttaagcaatgacctaatgtgtggtccagtggtgtggctctgactgtgacatttcccactcggtatgtgactgggcggacaatgactgacagtgcccacaagagtccacactaataacaaacttggacatgattgcaagggaacataagtgacccgacttgagcagtaaaaagactttctttgtccc

SEQ ID NO: 884 - DNA, 570 bp, Rattus norvegicus
tttttatttttttttgcagtgaaagtaaatgccttttattagtaggacagattttcaaaggtctttgtcattttgacaacaactgacagatgctctcttgggaacaattgaccattgcacaaagacaagagcaggaaaagaggtttagtggtacttgtgagccagggcactggccactccagccaccaccttctggaaggcagcctgtgcacagggggtgaattccttgcccaggtggtggcccaacacaatcacaatcatattgcccaggagcctgaagttctcaggatccacatgcagcttgtcacagtggagttcactcagatgagcaaaggtgcccttgaggttgtccaagtgtttcaggccatcattgaaggcgtttatcaccttcttgccatgggccttcaccttagggttacccatgatagcagaggcagaggacaggtccccaaagctatcaaagtacctctgggtccaagggtagacaaccagcagcctgcccagggcctcgccaccaacatcatcagggttcacctttccccacaggccattaacagcagccttctcagc

SEQ ID NO: 885 - DNA, 557 bp, Rattus norvegicus
tatttatttatttatttatttatttatttatttatttatttatttacttttctgttgtcagaggataatagatcacaagacagagatcagcagtcccagtacacagtgtggcttggttcgtttccaagggaacacaatgggcaggtggggcaggctctggtgtgagtttccactctggtgacctttgactcccgtaggcgtttgcatccacgggtgtgcataccctgttgctctctcccgctgcccctgaacccttccagccctctccactccgacccctgacaggcaggggaaagaaactgtagtctgccagattccacaccatgtggcagagagacagagccaccggcaccctgcctgctgcctgtcccctgggctatctcctgccacagaccagcttcagagaaggaaggagtcctctgtcagatgaattgggctagagatggaagtctcagaagcagggaaggtggatgaaggcagaatggctccaaagcctatggggatattgctcagaagttaagtaaggagctcattcctcagaggcaagaattcctggg

SEQ ID NO: 886 - DNA, 570 bp, Rattus norvegicus
ctctttataataattttatttctactttttatatttacttatttactttgtatgcttgtacgtcacatgcatggtgtgatgtggggtgggtgcttacctagagagaacaaggctctgagtctaatccccggcatcaccaaacacagtgcacaagtgctaatttttattccttcccagaaactcatctgacagtggaagaatgaggtgatcattgtcacacaggaaacactgactagagtacacgggctgtcagcaagtcacagacaacatcggggaacaacaaatgcatctgggttccaggcagccattcccaagtcacagtggtgttcctttctaggcagttggcaagagacaggtcaaatactttcaacagaatttttaggccaggtgagcagccaacaggaggagatggaacggctgagagacctggagaggaaggcgagctagcagcatgtccagcctggggagggtttggtctggagattgatgtagttcccttgggtggacgaagacattatatcttctctggaattgttcatcatcttttccacgaggactctcatggcctca

SEQ ID NO: 887 - DNA, 590 bp, Rattus norvegicus
ctgtagaaactcattttattcttattcagactatttccaaaagaagcagtggtgcgctgtttttctaaaaatatgcctttatagatttatgtgtgtattataaaatccatacgtgtatttacacaattgctacatacaaaattacagcactgtggtatgtacatgtctgtaagtacattctgtcgctcagccctgctgtgcttgtccctgtcgagggaggaggctcagtgagtggagagcagtgcaggccggccccacagagccttgagctggggcctcggctgagatggggtggctgctgcggaaggagcagaagcagcaggctgaaggcctttgtcccttagagacctggtgggcagtatctggaggctcccagcagccttgccccatctaccctgtggcacccacgctgccttcagtgtgagggtggtaaaaccaggcccctccaaggccactcttgtggcctgaacttgcttggcttggccaagaagttgcatttgaggtgggagggagctgtggaagacaagtgccctcctagtcctatcccgtgatgggggaaaagtctggaatggtaaagcctacagggccaa

SEQ ID NO: 888 - DNA, 613 bp, Rattus norvegicus
attagataatgccatttattatttcacacagaagttagagaccaaggttacaattattaaataccacccacccctcaaaagacagccctacttggttagaataaaaaaacaatcgatacaacaaaaaataccattacactggtagaactggggaaataacaaaaacaagacagaaacacaagacagaaaatctctgcacactgatatcaaagtggccatgacgctgggggaaagcagtcatggtcagtcaacatggacgccgactaccaagggcactgggctcagaacagccgcctctaccgaccacagttctggggctctgttgcaggatttggggctgctggtttccaagttcaggcccctggctgtgcttttggtgagggaaatgtgccaggcatctccttccattccagagagacaaaggaagacacaggaagggggcgaggaaccccaaaagctttcttagaggcccaagaaaagagagccaggcaagattctcccctgcagagagaaggctacatgagacagagttcacagcctctgggggccaacactgcatttacatggcataaattcccactgccacggtcgccaacaggaaactgagtgttga

SEQ ID NO: 889 - DNA, 554 bp, Rattus norvegicus
atcaatactttggttttattttaatgaaaagaaaaataaatatttttaaagagtaagaaagcagtgttgaggatggaaaggtccagccagaacggaggccagggggatgggcagaatccaccaaggagaatgaaaaaataagaatgaggttgggtaggaggataaagaggttggggtgtcttagctcccatggtcttgggctggctgaccaggggcctgggaattttactccctgcagtttccaagccgggccctttccagttccggctgtgatgtctgagggttccctccagcctcactgttgctccctgagggacattagctcccaggtggggttctgcgtttgtgtggatctgagtctgaggggattagcacctggtcccaaggcctcatcggcgtggcccccaaggcctcttccgtggctgtggatcccacctagcttagtggccgagactcagtggtgccccatgtcctccattcctacgcggccccagacgcccagcacgaaggtctcgatgtcacactcgttgatgccacgcacgattcggaagtgg

SEQ ID NO: 890 - DNA, 284 bp, Rattus norvegicus
gcttcctactcaggctttattcaaagacccaaaggtttaggtgcaagggagggaaaaagggcccggtcaaaaggcaagcccggcaggaggcggtttaacgggacttggagggcaacacagtgctcacagaggcaaggaatttgtccaaaaaggcgtgcctggcgggtgtgaaatctccagggggggggcaaacccagggcaccaacaggcattggctcaggaacttgaaatttaccggatccccaccccgcttgggggcatgcaagacgatcaaaagggaccgg

SEQ ID NO: 891 - DNA, 597 bp, Rattus norvegicus
aaatgatcaaagagatcctttatttaatgtagacagcctagtaagtcatcaaaataatttataatagttagatgcctcttaaatatacatgttatcttctgaagctaaaagtaatatgcactcaaccagtttttaaaatctatttggaacattaaacatgataaaagtagaaaaaaaatctcttatgaagtcctctacgaaaggaaattgtgacaagttcctgttaagacagaaaccattccatctccaagggagaacaagagaaacatgaatatgaacagaaacacctacttcctgggtttatcctaggtagaccaactctttacagttattttctgtcttccctggataaataagaatcccttaacagcagcccggaaattaaccaattccagtgaagaccctgagatggctgccctgcagcaggttcttgccttttgcagtcaacaacatcttttacaaagcaccttgacttatggcaggcgtgacaaaaccaggtgaattagttgtccccagccagggcccggccacctttagccttctaggcgccactgttgggaaaaggagccatcacagatcgccatgccgacgtagccc

SEQ ID NO: 892 - DNA, 545 bp, Rattus norvegicus
ggttccacttaaattgcatgttttatttctcccaaccccagccatagcatagaagccccatatatccatcccagactggtttctagtaggctgaggttatagggagcctcagtagagcaccgtctcccaagagccgggcacaagcgttgcccccacactgatgaagccaacagtgcactggccccgtgtttccgcactcagtctgagtttacaacacaacctcacccttgaaacggacagtctgggagtgggggtgtgagggagtgaaactgaaattgcctattagctcacccttttcaacattaaacagagaccaagagagaaacggttccaacatttcaccacatatatttcttcttgtgcagtctaagccgagaacgccatgtaaatgggtcactgcggaggcagcgaacgcagcaatttagttactctccgatcagagggagaaaccaaccagtatgatctcacgtctactgacttctgaaggtttacagcagttaaagtattttgcttctatgtatgaaggttaaaaaaaacattttttt

SEQ ID NO: 893 - DNA, 480 bp, Rattus norvegicus
gcggtaacagctttaatctgtggtggctgacacatgggacaggatcctgttggcctcccatccttccatgccccagaggaagagctacttctcagggagctgaagcagatgccatgagcaagttggtaattggtgtgtttcccagtgtctcctggagacctgtgtttaaagtgagcactgcagggcggacagcagagacaggctgcaagtccttacacacagggcttggagctgggcacagaaaggcagggctccagtattgatatattatacatatatatatatatatatttcatatgtatacacagatagttttctctctggaaagtattaaaaaaattgatcaaccttcaatctataaaaaatacctactctacatgatagaaaaatctctcctccaagtttacactgatttacacacaaggctttccccaaaatgtacaatacgaggcaacgtcttaaaccgtagtgtagaaggga

SEQ ID NO: 894 - DNA, 633 bp, Rattus norvegicus
caacaattttctataatagctaggagaatacagcactaatgacagacacactaagcacagtagacagctataaatttagagcataaaatgtcattctgatattgttttggctttccttttagcattaggtaatacccagtgaaaaactcgtgtttccaaggcttttgttgatatgaggtgaattcttgacattcgagaagatttcctgtgcgatactctggagtgggttcagtttagatccagcgaggcttggtaacgcctctcacctgtcagcatgcatttctgcttccccgactaaccactttgcagagatcaactgtgcagatcaaggaaattctttctccagatccaaggaagaaaaagattagaaaactgcaaccatttactgtattccaaaggcaggtccatttcatggtaagtgatgaacagttgaaataaaaccacaatgggttaaacgccatgagctcatctgtacaatactgctggaacaattgagactttcccaaacacaagaaaatcatttacttcagaatccacaaaagaacacaattctggatcataaatcacaacacagatctacacttaaaggagaaatcaccttttgtgggaaaaaaataatggctcacatgactt

SEQ ID NO: 895 - DNA, 553 bp, Rattus norvegicus
caacaaaagcaagtttggtttatttgaatggtttcattaaataagttctacaaaggtaacaaactgaagcacgaagcgcaatcttacaagaagcgcaacacccggagttagtgcaaaatgtacagttaacggctgctgagaaaccccaaggtttgaattcagttttaaacagtgtacattgttaaataacgtaaggaaaacatttataattcggaaagttctttttaaatgtggaaaaagatactcaaagtgtactattaacacaaaaataatttaaacagttcagtagctctagctcttgtctctaggcttcagttatttcatccacaggaggggaaatcaacagtaagtaaacctttgtgaagggggcacagacctcaaaaccaaacaccacaggctgcatttggctccctctactgctggtacaaaacactcaatcatccaaaacccgcttcactcccacagtacctctcaccctctcccaaaaggaataaatgagtgaacactttagtagcaggacctcaaacaaaaaccctgctcattacacttccct

SEQ ID NO: 896 - DNA, 429 bp, Rattus norvegicus
aatgctctgaaaacactttattacacaaattacattcagattctgaaaaatagtgttctaacagtgtaaccatctaaaaataagacatcccggaaacacaccaactgaggagaaatttaaaaaaagaatttaaatagagactttttaaaatttctctcattgcaatataatgttagtgattttaaaaaaatagaaggagatttagcagcttttcgtcgtgtggcaggttggttctcttcactgccacaggctgagaatgctgaacaggaaaggcaccaaagaaagacactggcgatgggtgtggactgggagaatactgtgttcaagcagagaatagggctatttacatccaccaactaaaacgtctccaaatgtgaatgagctaaacttccctcgggggttggagcgctaccttggaagaggagggcg

SEQ ID NO: 897 - DNA, 588 bp, Rattus norvegicus
caattactttaataaggtgttctgaggaaccaggaaattaacagagaggggcgaataagtaatgcttcttaagccctgctcagtatttcgtcagtcatcttctggtaactggatcttgctgggatcaaaatagttggattccatgatggggaggccgttgagttctcggtatttcacaagtctctcagcttcccggcgggcccactcttgcatcctgtaatcaggcaggtaagccacaaaggtggtaccaaaaaccaggacgatggaaaaaccaaagaagaagacagctcgcatattccagacgtccaccacagggtcactgtcataaccgtgaaagtctgggttcttcgcgtagaggttttcgtcctcgggttctgggtcctcctgccataccatggtcggttctctttgccgctttctctccacaccggacggggcgattacagccctggaagattcccagcgaacacgggcagccgggacctctcgtatcgccgccgctactgacaggcggcgagcatacaagcttaacagccgggccgccatgaccgcttgtactgaggagtccagggggtgggggcggggtgg

SEQ ID NO: 898 - DNA, 475 bp, Rattus norvegicus
gtcaaataatttgtcatgttttaatgggatgattaaaataaaggctcaaataagttttcaatatattaatttctttaaagtcatcttcaagcaaggtgctgtttaagaaaaaaacttagctttgtccacagatattaaatctcaaaagctacccaaagtaattttgacattggatgcagctttaaacaaaaaaaagaaagaaagaaagaaaacacctaggtcttctcaaagcaaattatacaattagagcccccaaatttgtaaactaaacattctgacacaaatgcaaacttaagttggcaacattaaagaaaggtcacaagtgcatgtgtagatgtagtgcttgccactgagtagagaaagtgacgtccatttggccatcagagaaggggactgcctagaaacctcccaaaccagttagggttaacaagaccctcccatcatcctacagcacacaggaaaaccagaaaagaac

SEQ ID NO: 899 - DNA, 512 bp, Rattus norvegicus
ggaggagaagtcagcttttatttacagaagatttgtcaaatgtcctttccagtttcctacgaggcccaactctgcgactcaggatcaaggacggggagtgactctgcctgcttcttatagcgaatgtgtttctaaggtgacttctgtgcagccaaagcttggagatgcacagacgtcctgcactctctgcccgtttgtacgttcatgatgaagtcagttgccgacatgttgggttttgcagtgatcttcaagagtgatgattccactttatgatgcagaaataaatcaaaacaaatgtggatctacaaagaagagacatcttcagtgtgcccgtccactgcctcagaggcagcagcccagagggcaaagtgcattgacgaggaggaaaaagatcctgtcacgtctcatagtgacgtggtgatgtctcgctgtctcgcagctttacccggtcacatttttattattagttgtgaaggtgacagttactttctgcttctgtccccttcaatcca

SEQ ID NO: 900 - DNA, 432 bp, Rattus norvegicus
atcagttctgctgtttatagatttcacgggaaggccgaatacattttaagggaatgaggaaaccgttcagtgtctagtaacatgaaacagtatcacattattccataggaaacgtgtatatttatgtagaacaggtcagtcctgagaaacggcgtcagctcagttcgtgtcccatccatcctcctctgagatcgctcttgctgcgtccataccagacatcccaggttggttagcagggcatacatctgaagctctcaccagacctccgcacctcatctacggctacatacagcagcctaaagaagcacggctttcaggtgtggtgtaaagactctgaggtaatagggaacgagttaatttgttcttggctgtagttggctcccaaagagtgcctgtgtttttcaaatgatgtcaactagaaaaagacaatgt

SEQ ID NO: 901 - DNA, 450 bp, Rattus norvegicus
aaaattaataaaaatattttattgaatttcaggaacttggtactttttaaaaattccaaatctttgcacacagatcagcactctgcttactctggaactgcagatgcttggacttcacgattgtcacttctctccttgtatcacacagcatagaaaacccaagtcctgatgctccccaaccccttctgaactactacagctactctgaccagcccctcagcagaggacagggaagtggggtggggtgtgtatggagaccagctgctgtctgaatacattctgcagtgtgggggaatagctataccaagttatgccacacacattctggaatgcaccgtacccaggacacaggtgagtttccctttgagtactgtgtggttcaagccaacactgctgaggttatctagtccctgagggagctcagaagtttggtaaaggtcaaagagagac

SEQ ID NO: 902 - DNA, 314 bp, Rattus norvegicus
aaacaacttcaaacagggctttaattccaaataaaccacagacccaggtgcccaggagaaagcagaaccaagctgatgcgctgaccagggctggcagtgtcgagtggagaatgctgggcgctcccgacccactgctcttcctgactaggccttctggtgagcgccttcatgtggacaggcccttgtgtgtttgggcttaggcagtctgactccaagcagtaaggcctccaggcaccacagtccttggtccatgagcagagcaggccctcgggacagaggtggccttgagacctgaagagcttctgtcctttccg

SEQ ID NO: 903 - DNA, 574 bp, Rattus norvegicus
gacagttcgtgagagagaagctttattaaaactagtggcagatctggactgctactgttgcgcctttggtgcatgttgagcctgggcaaggatgggtacatagggagatacaggtgggatgaggagcaaagagggagggcgctgcctactgagactgtgctcaactgttctcccagaagaagttgttacaagccactgtgagagcagccaccagcacaacaaactcctggaagtccacttccccatctccattctcatccagttccttcatgatcttgtccacagcatctgcatccttctggacatccaggaagctggagagttcagtttgtagcaggtctttcagctccttcttgctcagcttatatttgtccccttccttgcccgagtgggcatggaacacattgatgagggtctccatggcggtctccagctcagagcccatttcagcagcacacggttggcctcggcctgacgtcggagcaggttcttgacagaagggcgcgctgcaaatgttgccccggagcagtgtggggagacctgtctttactgccgaccctcctccccttgtgcc

SEQ ID NO: 904 - DNA, 592 bp, Rattus norvegicus
agggacccaaaatacagagataatttattggtcacgcatattgtcccttgcatgtttatctgtatagcatgtgtgctgatcccagcagagacatgaaagagggcattgtttttaattggcaccatgtgggggcaccaagacatgaaccttctgtcctctagaagaacagctaacggaaatctttatagctgatccatcttgacaggtcctaaagataaaccttatttaatctgcaaagtgaaaaagttttgcaaggtcatgcccagagctaaaattttgacgctttcctttgcaaagctgaatggtgaaggtgtcaagaagaccagttctcagagagaagactttaatgaatatattttacaaacacactggagaatcaggcaatgcttcctgcattggatgcaatcctgggccacaagtctgcacactcctttgcaactggacctgtgatagcagaacctttcatctcgcctttattgtttactatgacccctgcattatcttcaaaataaaggaacaccccgtcttttcttcgatatgactttcgtagtcgaatcaccactgcaggatgtacctttttccttagttatgg

SEQ ID NO: 905 - DNA, 455 bp, Rattus norvegicus
tttttatctttttaatatacattacaaatattttaaacaatgacattttgttttgtttaacgtatttacaaaacaaaaatatattacaataaatatgaatgagacagtgaatctgaccaacaacaaactgtcacgacctggtatttaaaaggaatgcagaacttattggtctgcatgtgttaagagttttgagatagacaggcatccagaatcataatgcatctggggaagagcggtggggaaactcccagatttaaggaggggttctttctcattgctaatcgcataacgtttaatggtatttaaatcatgaacattaatgacctatgcgaacatgatataaagctaatatagttctaccacctcaaaatgtatgtggcagccacataatatcctcttaattattgtcattatatactgtagttcacacaatatctacaaatgtggaatgaggc

SEQ ID NO: 906 - DNA, 465 bp, Rattus norvegicus
ctcatttagtttttattcataatcataaacttaactttgcaatcctgctagacttgaaggggaatgaggaaaatatggaacccaaagaacttcagtgagagcagagattacagggtattgcgagcagatggggtgggggtgctctcctgagctacagaaggaatggtttgatgggtaaaatgcccgcaagtcaaagaaattagagttgtccacagtcggagatggtgatcttcttgctggtcttggcagtgcagataaaaaactgggaaccatttgtgtttggtccagcatttgccatggacaagatgccaggacctgtatgcttcaggatgaagttctcatcctagaaatttctctccgtagatggacttgccaccaatgccattatggcgtgtgaagtcaccaccctgacgcatgaatcctggactagttatgtgaaaggagtaacccctatagccaaatcct

SEQ ID NO: 907 - DNA, 495 bp, Rattus norvegicus
cccaaaacaaagtaacttgaggtttatggcatacagtttaggtcaacacacatacagaagggggaagaggacatggaggtgtccgaagcaaagctgagtgacggaacacattcagttagtaggtgtctatacaaagagtggtgggacatcaggaaaagctcccatggattcatgtgcacccatctggaggtaccagattcctccatggcagatccatgtgcagagctaagggaggaggccacttctgtcattccagttttagaagctccacatcaaaaacaagagtagcatgtggtgggatgatgcctgggtgcccggtggctccataggcatagtctggggagattatcagtttggctctctggcccacactcatctgggctaccccttcttcccagcctcggatcacctcctgcttgcctagtgtaaacttaaaaggcttgtttctgtcccgagaggagtcaaatttttcccatctttaagcatccacgtgta

SEQ ID NO: 908 - DNA, 379 bp, Rattus norvegicus
gccatccaaggggctttctccattttatttctttgggaaaggaaaaatgaaaagtctttccatcacatatggtagatatatatatatatatttatatatttatatataatttattttgtggttggacattccaaagctgttcatatttttctctcccccccatctcttttgttttgtattaatgccttttcccagcccctgtggaccaggcttagggtctggatcaggtatagtgagggattagagggatgggcagtggttgccagagtagcctccaatcaaggtcataaaacctgttgaggaccacccagaaggagctgtgcagagagttggaggctacaaataggacactcctatttttgtgggggtgcctcgtgcc

SEQ ID NO: 909 - DNA, 319 bp, Rattus norvegicus
gagaagccacagccttttattttggtgaaaaaatggagtatcagggcttctattcaataaaatatggaaggttgaggaatgcttgcttgcaaaagctttgcacaaagaagtgctggtagatacttttattttggtgggaaaacgaatgctgtctctttctctctcctatctctcccccctcaggcaactgtgccctctaccatcgggggggctggtggtaccatgcctgcgcccactccaaccttaatggtgtatggtatcacggaggtcattaccggagccgataccaggacggggtctactgggccgacctcgtgcc

SEQ ID NO: 910 - DNA, 219 bp, Rattus norvegicus
agcaaaaagcaaacaacttttggcttttattagaaaatacaggcagaatggtaagctggggtaaaagagaatggaaagatacggagactagacatttgtctgtgtacaatgagaaactgttttggtgtgtgtgtgtttaattgagcacagtattaaatattgattacctactaatggtgatcccacccactcccaacaaaacactttacaaacatcggt

SEQ ID NO: 911 - DNA, 555 bp, Rattus norvegicus
caaaatatattaaaaaaacaaaacaaacaccaaatagactaagaggttatcttacaccacctgcttctcaagtctttatggagctgcacttctaagtcaatgggtgagttcctctctgtgctgtcagccaaaggagccagcctctgctgtcaaactcggagtcccagcagctgatgacatgggagtcggatctagtattgctagaggagcttgcttacaatggcagctggcatgtccgttagacctctttttcagaaccatttgtctcacatacttggggactgctgtgcagggacacccggtgtggcctgacgaggcaacgtgtacatggctcccaaaaactggtcggcaatccttcctgcttctcgaagcccactcagcagagcaccatggaccgtagctgggtagttgcggattgtatgttctccagcaaagaagagtcttggactgcggatgttttccactcaggaagaggcggcacaaactgaacagctggtggctgctgcttcagcactcccaaaggaagggttcagagcactgcgttacactttataa

SEQ ID NO: 912 - DNA, 568 bp, Rattus norvegicus
cctagatcatggcttgtttattaaaatattggtgaaaaaataggagtctctagggctgctgacaggaggggacatcatagcactcaaggtgtctggactctcctcctggccactctccttttcctgatcccactctgtaacaggctggggctcctgctcaccagagacagccttgctcttttctttggcagggcagactgggaggaccttcttttgacctcctttgtgctgagagccttctgatgctttttgctttcaggctctacgggggacacaggagtggatccattcacctgtgacagcttctcttttttcttctgcacttttggggtcttggcagggggggtgctgggactcagggtggggttattgggagccggactcttggccacagttactccattcacctgggatggggtgttagccttcactctcttccttcttttcttgcctgtgctggggggctggtctttaccagtggcagcaggcatggcaccctctgtcactgcatcctgctgtgatgcagccttcttttctgatgtggtaccctcagaattaagtttctttc

SEQ ID NO: 913 - DNA, 550 bp, Rattus norvegicus
gaatgtccactggagtttatttacagacaaccttaggtaaggcattttcctctaggatctacatcttgcgaagttacttggcttcaggcttcttgtctccagcttcaagcttgagatgctcagggggctgacgataggcagggaaagcctcccaggggctgttcaggtcaaacttgcggaactcttgtgccaactccactggctcagccactacccgcttcacctcatcgtcataacgtagctcaacatagccagtgaggggaaagtctttccggaaaggatgtccctcgaagccataatctgtcaggatccttctcaagtcagggtggttgaagaagaaaactccaaacatgtcccagacctccctctcataccaattggccgcgatgtgcacagacactatggagtcaatggctgtcagctcatctgcataggtcttcacacgaatcctagagttaaaccgcagggacagcaagttgtagacaatctcaaaacggttctgccgagttgggacatccactgctgtcaagtcagccaaagatttgaactg

SEQ ID NO: 914 - DNA, 534 bp, Rattus norvegicus
aatgctctgaaaacactttattacacaaattacattcagattctgaaaaatagtgttctaacagtgtaaccatctaaaaataagacatcccggaaacacaccaactgaggagaaatttaaaaaaagaatttaaatagagactttttaaaatttctctcattgcaatataatgttagtgattttaaaaaaatagaaggagatttagcagcttttcgtcgtgtggcaggttggttctcttcactgccacaggctgagaatgctgaacaggaaaggcaccaaagaaagacactggcgatgggtgtggactgggagaatactgtgttcaagcagagaatagggctatttacatccaccaactaaaacgtctccaaatgtgaatgagctaaacttccctcgggggttggagcgctaccttggaagaggagggcggcttctctacgctaagttcatataaagacaatggcactggagtgaactggtggggaactcctcacctagagaacagaagccaacggagccaaatgaagtaaataa

SEQ ID NO: 915 - DNA, 305 bp, Rattus norvegicus
ccaggggttcttaacattctacttttaataaagtttctcatgttggggggaaccccaaccataaaattattttgctgatactccataactaattttgctgttatgtcatagggtaaatatcggatttgcaggatatcggataggaaacctcaaaggggttgggacccacaagttgaaaaccattgcattagtctaaccttacattttttgatgagcacacatagccacctcagccttgcactcatgtctctgaaaagttgtgtaaccaaggcacattccttagtctgagggcttgagtgaggaac

SEQ ID NO: 916 - DNA, 459 bp, Rattus norvegicus
gcctggagatcgtcttcgtgtcctcggaccaagaccagcggcagtggcaggacttcgtgcgggacatgccatggctggcgctgccctacaaggagaagcaccggaagcttaaactttggaacaaataccgagtctccaacattccatcgctaatattcctagatgccactactgggaaggtcgtgtgcaggaacgggctcctggtgatccgagatgacccagaaggtctggaattcccttggggacctaaacccttccgggaagttatcgctgggcccttgcttagaaacaacgggcagtctctggaaagcagcagccttgaggggtctcacgtgggagtctatttctctgcacactggtgtccaccctgccgaagccttaccagagtgctggtggaatcctaccggaagatcaaggaagcaggccagaagtttgagatcatctttgttagtgcagaca

SEQ ID NO: 917 - DNA, 450 bp, Rattus norvegicus
  misc_feature (1)..(450): n = a or c or g or t
caggactcagtggaatgagatctcctggagccctcagcaaagctgaggagagcaaaggagatgacaggtgagtcctcaacaaaatacatatggttggcacataaatgggaggaaccctgggcctgctctggaggagatggatcaagaatcctaaggcactgtgcttctgtggatgccttgatgaagccaaagagctggcactgtcaagctctggtttccatggccactgccttcggtggagtttagttctctcccagcccctcctccttggggcagggaattttagtatctggtgcctttatcacaaggtcctggggtctggaggtagaaagtgagatgcaggagaagaaatggggcanggtgataagaactccacttcctgcaagtaggaaggccccagccaaccagatgccacacgccccacaaggtcagaaatagcagcctcgtgcc

SEQ ID NO: 918 - DNA, 478 bp, Rattus norvegicus
ttaatacacatccatgaaaagacaaggaaattcaaaagtgagctagtacaggtcttccaaactgaggtacaaatgcctccgttcctccagcaattcccactggtattcccatgatgcaaccgtctgtggcaacagtctaccgtaggaaggggtggaggcagggcaggaacgcagagaaatgtgtccaattcagagcaattttcaactttgccctaactcaagtaccctcatgggactgtcttgcaacacatgttctattgagaaaagaggtttcaaaccaaagggtgggtgactgcaataaatatgacatgagatgaacaaggcttgggagtttccatttatttattctaacatttgcccttctcactagacactcaactccatgagggtagagaatgtccatactgttccactcgcccctggcacctagtagtgactcaataaatatatgttagaaggatggattatccatgattta

SEQ ID NO: 919 - DNA, 544 bp, Rattus norvegicus
atattgcaattgacgaatccttgaaaagcagcctttcaaggttgcctttaaagggctctacacaaacggttacaccggatcgctggcagagacctttcagaaactgtagtcactgagttcattatgagtcaaggtgcttgtgggttggttgaggaagaaaagatcaacacatcatacataaattcacaaagtgctgaagttacacacgggaaactaactttgaagtaattctggtggtaaaagtatcaacaatgaagattcaagggagaccaaaccatcccatgaaaggattagtttaaatcagagagcaaggagagcacgtcatccccaaaagccgagaccatgactccaggtctagtgcacaccaggaacatctgaccaaggaggtccctttccttgtccatcatttcagttctatccccttttcaagggcatcgaatgctctgaaagtttcctgtgtcttggcttatacacatatctacctccctcccagaaagaaagctcaagaaagcaggagtgtgcagtctttcttgttcctggctga

SEQ ID NO: 920 - DNA, 466 bp, Rattus norvegicus
gtatttaaaattcagtgttattcacattttcttgcaacaacatcataatctcgttagcaaacaattaatgagagtgttctgtacagcacagaaggtcaggtggatgccagggcagggctccaatgggaggcagcacagggaggcagagtgtccctttgctgtagcacccattttaattttgatcccatttttaatttatttattatgcgtcagagataggagacatggctatgtgatcatcgaggacaatctttggtgtccgttctccccgtccaccctgtagttactgagagcggaacaggatgtcaggtctggtaacaagcacccttccctccaggccccgcctgccctggaatctcaggtctcaggcaatttaactccattttcccttcagaattttctgcagtacaggttagtagaaacatttttttctgagtttttcagagaaaatcttcacaaaattaat

SEQ ID NO: 921 - DNA, 626 bp, Rattus norvegicus
caatgttttttttttagatgactcaggactttaatgttcttcatatcgtcaatcgaaaacactaacacatgaacaaccagaaaagacctcagcaaagatctggaatgtacagattgccctggttaaactacaaaaacagccatgcgatcacagtttgggggtgggggtgtaactgagttttgtttaacggcctaaccgaaaagcaaagaaacaaccatttcttctacttgtggcaagaaaagtaaatcatggaactcctagatccttctcatgaagcagctttaaaaggcagtaggtggagggtgccagtgtccacaacagacgacggtcatgcacaaagtcacgggctgaacgaactctgaaaagcctctacagaactgtttcattagaaattcaaaagcatagatataaaccgtatggtgtttaaaaaagttcccaccccataaacacggcctatcatgcctgtctttttatgggaattgcagtacacagatccagaatgctcatcagtcactgctgactttaaccaacagctgcagaacctggccgactcacagctgtccatccagcacataggacctctcaacctccttgggatacgctcctaacgataaagaaccagttgg

SEQ ID NO: 922 - DNA, 466 bp, Rattus norvegicus
cccagctttttaagttgcatttatttttgataatctgtactgtagccaatcaattctattctccattcttgcttaattgtattagccataaaggagttcaggttcataggactcagtttctctattaaaccgtcattgattatggaaatactgtcttaagcactatgcagattaacaccatacttttcttccattacatctttcaagacagtcactcacaactcagaagactgatacagcattagatgaaaaaaacaagattcacagatatatgtagtgaaactcaaactaggagtcttagagataaaaaagataagtagatatttaaaatgtagtctgttaaagatttaatcggtttaaagtataagattagaaagacaaagtttctattgttttgaaagttttaagtaaagaaaaaaaaaactggaaaaaatgtctttgttgttctttctccgttcttaattac

SEQ ID NO: 923 - DNA, 323 bp, Rattus norvegicus
gtgcgacgccatcctgtgcacacagggggcttcaccaggcttctgtgtagcgaacatcaacctcctttagattaggaagcttggccttcagatcctcataggtgtcagccgagagcttggtgctgttcatatttaaactgcaaagactcttcatggagctgagggccagcaagcccgcgtcggtgactggggtctcacacaggttcagcacctggagcatagtgaggtgttccgacaggagccgcaggccggcgtctccaaactgcgtggaccacaggttgagctgcttgagagaaggcagtttgatgaggtgctcggcgcag

SEQ ID NO: 924 - DNA, 418 bp, Rattus norvegicus
atgcaaaaatttatttgaccaaaatgtagaaaaagtgataccattacgtatgatacaatcgcaagaatctaaagaacagagtagattttatcagttgcacagtttgctaaaagttcatctccctggtagtgtgatgcttaataaataggagtgaagggagtgtgtacatggaacagtattaaagctcgatcggaaggcacatgggcagcagtgatcaccccagcattctcacctgggaagctgaagtaaataaatctgttctccacggcggagtgtggaacagactcagtaagatcgggccaatctacttgtgctttatgacttcccatagacgggttttaatttttgctctgggtggaaaatttctacatttttcttgcaacaacccctagccgctccaacatcagaaccttgtgcc

SEQ ID NO: 925 - DNA, 616 bp, Rattus norvegicus
caaaaagtcctagtttgatacactttactaaacaaaattaaaggttaactgtacaagcaattaaaacatgatatgtagcaagtgttatcaggagttttctattggcaaactgtttaaaaatagtcacaaactgagcagttagaagtaccttcgaagtaagcactgctcccaagtgacaggaagcctctcccgaaagctcccctaagagtgccagctgcccagcaccctcaagtttgggactgaaagtcaatggcaattgagatgggaggtgcagacctctgtagggtcagtttccagtttgccaacaggagtatgagggacgccctcaaagtagaggaacgtggaactgtatagcctcgaaggagggcacattaggctcacatgagccccagtcagtctataaagaccttgtttggactagagatgcagtcagtgcttggctggcatggagtcttgttggagaacttcatgcatgcccacaggtttatgtcaaacaagaaaaagttaagggctgggttgtgaacacacagagaattccacgatggcattcacaacaaggtgcccaagtccccttgtcacaacactttctgtatgacttaaggaatgtctttatgta

SEQ ID NO: 926 - DNA, 410 bp, Rattus norvegicus
tttggggggttagttttttttttcttccacctttacgagagctctggggatcaagcttagatcattaggtttacatgacaagtgtctttacccactgagctagcccatgattacaaaaagtattttctatatactgaatcgataataattaggcatatcatatgctagtaataacaactaaagattattagtacagacatactcactgagaaatctaaatccaaaaactcacagccaagttttcaaacaaaatgtacctcaaactatgaccaatgtttagctagggcttgccaggctgggcccatacaaatgttttctgagaagcctaggctttgtgtggccagtagcaataccattgggagctgttagcatttggactataatccctacttataattctatacaccttt

SEQ ID NO: 927 - DNA, 589 bp, Rattus norvegicus
tgggatgttaactcttttattaactcagggttaacattagatttgcttcactgatttcttatttgaagttgtggattcaacagacaacagctgagtccttgccacttacaggtgacaagacaaaacacattatattcagagaggagagcaggaccatatggagagagacgaggttggaaaaatttaaggcaaatgttattcccacgttaaagggaactggaccaagcagatctgcgcatttcaatgaaaatatatgaaatatttgtcaaaataattaacatcggtaaaaattagaacacgtagcttataaaatgcccacacaggcttggcagaaaaatcaatccagctctatcaacgtaggcttgtactatactgggccagagcagtgtccacccgagaacagagtcctgagtgtggaggccaaatgcacttgagaagcagttgtgtgccatggagggctggcgattagtgatttggggctggctttgcataaggaggaactgcttggccattagaggtctttcggctagccttaagtagctcctttggacccttctccacaggctctgtatctgtagatcctcgtgcc

SEQ ID NO: 928 - DNA, 585 bp, Rattus norvegicus
atgcaaaaatttatttgaccaaaatgtagaaaaagtgataccattacgtatgatacaatcgcaagaatctaaagaacagagtagattttatcaattgcacagtttgctaaaagttcatctccctggtagtgtgatgcttaataaataggagtgaggggcagggttcagataagctataagcaggtgactctccgtcagcactgtaaactcgaggtggccccacactgctggggaatgtggaatgtttcagggagatgttaactgaaaaagcaaaactacaatgccaaaaaatatgtgcagcctctagagcgctccacgtccagttcagtcaggagttctcggactgtattagtgtcattcccaaaggaattcaagtctcagcaaactcaagctcccatttcttgatccctgaacaatggatatgaagttaagccaattgctttctctatcactactttgcggctggagagaccctttgttgcctaacccttggcatcaatgttctgatggctggcaacctgcatattatttgagacagagtctcgctgtgtatcgctggtacctggctttgctagcagtcttgat

SEQ ID NO: 929 - DNA, 729 bp, Rattus norvegicus
agttagaaacattttatttaaatgtgtcaaataaaaacctacatttccagaccataagatgttaatacattcaacaaaaacaatatttactgctgtgaattttacagagtaataatccagatccattttgattagatggttgatgaaccttcctaggttacactttacagacataacaaatcccttataataatgtaaacaaaataacttttccctaacgggtgaacttgagaacttcagtccattctttctggacttgcacttctgtgtggacttcctgatggggaacgacttcttttaggagatggagatctggattttgatcggctgcttcttggtcgtgaaatagacctggatcttgatctcgaccttgagcgggatcttaataaaaaggaaaggggacacaattacaagaatgcctttataactaagcaccttcccagagagtagataggataggaaagagtagaaacaattactgcacaagtcttgcctctcacatggatccaatctaagaaccactatttcagatgcctacctccaccatacacagtatggtcactacgcctacaaagacacaacagtcccactttctaacactaatcaccacaatcaccaagtggttccatccaactgctgagctgactttattcttgttatcataagtgctccgtttgtcaaaccaaattaggctgaccatatcttttgaaaatcttgggaccctttaat

SEQ ID NO: 930 - DNA, 608 bp, Rattus norvegicus
gaaaaaccaaacctaaaaactcactttaatcacaacccaacagcgccaggtgcaatgtctgggaagaccctgggtacaatgctgtgtggcagacacacactcactcacggctctgagaaggcccccaagggggacttaccttcagggactgagccaagagagggggaaggggcagccccagaatggggactggggcactccgtagggaaaggtgctacttcttggcaaaagagatcttcattgcattgttctgtgtgatcttgaagccttgcagggcatctcgtgctgccccagcctgcacttcattgtcaaactccacgaaggcaatgtcatggcgcccagggaccagacgcacctccttgaagccagggaactggttgaagagcatggagagcatgagctcgttggtctcctcaggcaggttggtgaggaacaggatgtgattgggtggattctccgagagaggttgggcaggtggcatctgcccaggcatgagctgctgtgggggcattgccccaggagggatctggccaggagcaaggcctggtggcgggatcatgccatgtggtggcatgtagggaggctgtcctggcatgtggtgcatgatg

SEQ ID NO: 931 - DNA, 480 bp, Rattus norvegicus
gaggctggagcaaaccactttattcagcactgaaaacccagcccacctgggagtcaagctggagccggtcaccacatccaaggctggggccttctgaggacagaacactgttccccaaacctaaatccatctatgtgtttggccctggcctgtgtctgtccactctgctgggttttgtctcttggactagttatctacacacaagatgctgcaggcaaccacgctaccggtacgtcacaagttctgcgagattcacctactggagaaaatgaggtgagcaaaagccaaaaatacagcgaagtgaagcacccggtggcctggagatgccaccctgctgctcttctgcagggaagaaggtcctgtccatgagaggtggggagaagtagggagcactctggggacgccagtgacacccaaggggcacaagctgggaggaaaagaggctggggaagcaaggcataatatggctcccaggacctg

SEQ ID NO: 932 - DNA, 408 bp, Rattus norvegicus
cctacttctgctttattcaaagactggttcaggggacggaagaagggcctggtcagaaggcaagcccgacaggaggtggcttaacggtacttggaggtcagcacggtgctcacagaggcaaggaatttgtccagagaggcgtgcatggcaggtgtgaaatccccagggtggtggcaagccaaggtcaccagcaggcagtggctcaggaacttgaagttgacaggatccacacgcagtttgtgggcatgcaggtcgcgtaactagttaacattgccagagtctcgttcgttatcggaattaaccagacaaatcgctccaccaactaagaacggccatgcaccaccacccacggaatcgagaaagagctatcaatctgtcaatcctgtccgtgtccgggcccctcgtgcc

SEQ ID NO: 933 - DNA, 618 bp, Rattus norvegicus
atagactaggaaatataatttatttcataaaaattaattttgttacaagaggaatgctaaaggttatttacaagttgtttacagaatgaacgggtggggctgggactatccccagtggatcagaacccacagacacacagccatgttcacagcctgacatccaagctcccacacacccgacctctgagggcgggaggaaggtgctgactcagatgcctgggagaacacatgaacttgtaaagaagataaagaaagacatccatgttttgatattggaactaaaatggtaagggctttggccagagtaaagaactgctcagtcgtatagaaaaggcattcagctgtcacatgtgtttatatgaaaagtaaaagaagcccgcagtatccagggttggtactgtacactgtggtttgggtgtcactggaggtcttaaggcgcgtatcttgggacagaacaatggagagtggacagcagaattaagtacacatctggcagaagccacctgagaccattcaccggtcctctctggtaatgctgcaacgctgttgtttctcacggctatagggacactggcatttggcttgttgtccactttaaacagcaaacaccccaaaagc

SEQ ID NO: 934 - DNA, 547 bp, Rattus norvegicus
cagcatcaaacacatttatttcacttttattgagtatacaagaacagagagcacacgcatacagcacggagcactgaggtgggagagcgtggggacgagagaggagagaggggagtgggtgaaaaggaacagaacagcattgcagttggctggtaaggtgcttttggaaaaaaaatagatatctagagtggtttgctcatgcaatttcaggccagtcttcgtgtgtgcttgcaggattcagaaactgaaacaggtcctggcacttcctgtacccttgtgtggaaaagattcacaggaagcgaacgtgggggaaacaaaggtgcatgagacacagcgtgggaagaagcctcagggtgcaactagtttgccctgcttgctgaggtacacgggacggggtagcccagtgtcacgtggtgggtcaggagttgcatcaggacggtcatctggaaccctggctgctctctgaggcttttcccactcggttacctggacccccggatagcaaggtgccacagatacaatgagacactcaaaaaaggcaaaagaa

SEQ ID NO: 935 - DNA, 573 bp, Rattus norvegicus
  misc_feature (1)..(573): n = a or c or g or t
accacccttacttattggctattgagcctttaagggacctcagggcaggttggggattacttgctgtttaaaatcttgtagtccctcttggcagggggagagagtgggcatgggtccccgttgccagttaaatccacgaatcctctcttaatgctctctttccacccctccgtgcactccattttgggactgggttagtacttgtctctacaacctaacgggactgaatgaaaccagaggccagagaaggcaggtcttgggctcccccataaatgtcacttctcagtggttctagggttgggtgttctttggacagacacagcacatagctgagatctcggtggcccacgggttgtatagaggagatggctgatggagccagtaagaggtggcttgctccgggttgatggagactgggttgtaatgggcttatggcctggattgggcaggagggtctggagagtatagctacccnctggcttcatttcatcatttaaagtagaaagactggccttgaacttgtggcagtcctgctgcttttacccccacccccaatgttaggattacaggtgt

SEQ ID NO: 936 - DNA, 477 bp, Rattus norvegicus
ctagttccaggaatagttgttatggggttgatctgaagggggcatttgggaaaatagcatgtttggcctacctgggtgctttgggctgggactgcaccctctccactcagcctttgcagttgcctctccttttcaaatgcttttaatgcttttcaaacagtgagagcttgttgcaatggctggaggctgtactggtggctgaaagcaccccttgcctgcccgcaactccttccccctccaggaaatgcttgaaaggggccatgcccgccttgaggcccccatcttgtgtggtagaatgttatatccagggtggccctgctcctctttcccccaaagtctccctcaagcccaggagaaggggttcttgcaggtccctaggagctgatgacgtgcccggaccaggtctcatgcttcgtccctggtgccaggtgggtgatgaccacctctacagcttgcagtttctcattcttgggcggg

SEQ ID NO: 937 - DNA, 544 bp, Rattus norvegicus
gaaagtaaagtgcatcttattaaaaaaaaatacaaaacccatgtaaattcagggtcctcgtgatgggcagtgtcagtatcccttagagtggtgggcaagggcatggtgagctaggacagggaacagggaggatccagaagtctgtgttggaattagaaaacagggctgatgaggtgggtggcgacacagttcctcaactgggaaaaggacagcaggcaacagtcttctgtcacaacgccccctggggtcactcccttgctttccaggccacagcctgatacaggctggagaagtctgggaactgggactgagcccagggtctggtgaggagggctgcatagccagcctagccctctagtccctgaggtggtggggtgtcagcggtcacagacatgtccttggttggctgaagctggagcagggccctgattctgcagtggcctcagcagcggattaaggcggaaggtagaatgaatagtccagtgggggagggattcccaactccagctcacaaagccacttcatagaagtccccaagagccca

SEQ ID NO: 938 - DNA, 617 bp, Rattus norvegicus
  misc_feature (1)..(617): n = a or c or g or t
atcaaagattcaggcattttataaagtattcaggaatttagagtacccgaggagcttgaggcaggggatcataggttcaagggctgtctgggcttcatactgaaaccctaccttataaaatagggacataaacaaataacaactcattgtccagtagagtccttccaatatgccaggtttgtaaggaaaggtgtctggcaagcctgcaaggctgcaccacaggccagagtccttaggtctgcttcagaggtgcaggtatgttggcagatgcctgctcaaggtangccaaggagccctgaggcatgtcggctggcttcttgtgctgcacattgatgtcttccagcacctgctgccaatgtctcaattttgtcaagtgcttctggaccagagcatctttccgctgcaattcactccttagttctgagacatcctctttgataacttgatctggtttctggacagacaattgcaaccttttttgtaagaaaaagcattctgtctgtcttgcaatgtccaaaaacttctggatacactgatcaacaccagttcgaatttcttcctgatcaatcccattgacataatcctgactcacaagggaagcaaagcaagnctnaaat

SEQ ID NO: 939 - DNA, 549 bp, Rattus norvegicus
  misc_feature (1)..(549): n = a or c or g or t
atcaatactttggttttattttaatgaaaagaaaaataaatatttttaaagagtaagaaagcagtgttgacgatggaaaggtccagccagaacggaggccagggggatgggcagaatccaccaaggagaatgaaaaaataagaatgaggttgggtaggaggataaagaggttgtanatgcctcgctggtacaagaagaagtcttcgtgtacttccataagcgcttgaacggggccattttccattagctccttcatgatctccttctcatcggaggccaggcggtaaacaggcgtgacctggtagatgtcattggaatcaacctgactattggggcagcgagaagtggcctggcgcttgcccccccccatggcgcggctgtgcatcatgcatcgaggagtggggctggcctcgtcgttctgctcacggccggagaatgggtaacagttatcagacaccacccctcggcgccgcaggaaccaccaagcaccatcgagacgcccaccttgggagcccttctggtggtgggtatcacaggataacangttct

SEQ ID NO: 940 - DNA, 454 bp, Rattus norvegicus
gaaattcaaagaaatctttttaatttttgaccattggtaaaactttaccagaaaacaggatgtactttaaaaacttgaatcaatgaaaacatgaatgaaatatgaaattaagactcattctggtggcccagtaagaaaagacagaagcccattatcaagacgaaagaaccggtggacccgagtctctgagaacagcgagtacactgagttccaggacggcctccctccacacccgggagtaactgcgtactgagttagcaacccaaaattcatgttcgcctcccaactgcctcaccggacaaatttagagtcatgattctttttgacatttacagtttagacatataagctcatgttaaatgacaactggtctgtcaaaagtacaggagaagaaaaagcaactgtttaattaaaacctttctagatttttgtttttgattattgatcaagttgc

SEQ ID NO: 941 - DNA, 549 bp, Rattus norvegicus
aaagaataaatatttttgtaattaaacattatgcaaacacgtgccacgcttgctttatccatgcatatgcgctatatacaattttgaaaaatactgtgttgtcctcttgttttaaaagtcatatacaaagtttttgtgttttttgtttaatcctcttgctgcctacccccttctccctcccaagaatttcctttacaagtagctaataatcattattcactcatgaccttagggtatgagagaaagtgaaactgtgtgtggaggtgtgtatgtgcagggcaggaaggggaagaggtcctttaccaaagtacaacgaaatggctggtttggacatgaaaagcagtgtccaggagctgtctgaatgtttaactgtactacactcaggaagaagaaaaggaagtcagctttgagaatgaagctacgttacaagttagagttggagggcttttgtgtgtctgtcacactgttggcggcctagaatactgttgtacaatggtttatctaccttttttattacactataatttacttaaactttccgttaacaaa

SEQ ID NO: 942 - DNA, 482 bp, Rattus norvegicus
aacattgctatgatttattttatttactttcctttaagtgggcacttggatccactatcagctctataggaactaacattcataactaaaaaatcacacaagcaaacaacagaatgaccactcctctccagcggtgaagatggggctgggcaaagcttatgggtcggggtgtgggatatcaaaatgggtgcagagggtaggaaagatgcacatcttaatgagttagcatagcccttaatcgtaggaaagccctgtcgaggtggcacaggtgaggtgtttcgtcatttccagctctaaaacactcaatgcagcttggttatagcttttgaatcattgtgccaagatatttatggatgcttggaagtgtctcagaaaatcaacccctaatatttaaggatcattgagtctacagagaagaaagctgcctcaagtctagacctggaaactggatttctctgctaccattcctagccattgtcccc

SEQ ID NO: 943 - DNA, 542 bp, Rattus norvegicus
cactcaaaattcttcagtttttacaaaactaacagggtggagtagggaagggagcagggaggcagccgcaggggtgggtaggcggagaggcaggctatgcttctgtcttcacctgagcctggttgcctgccacattgttcggctcacccttcatctcagcatcagtgggatggtctcctgcagccacttctgtcttggccttatgttcctcctcagccagcctctcaaacatgttggcatagagcttcttttcccgggcaagctgcctgcgggtccgctgctggcacacagccagctgggtcttggcggctttgttgctgggatagagctgcaggaccttttggaagtcagctcgtgccaggtcaaagtcattcacggccaggtgtgcctctccccggcgaaacaggcccttctcattgttgctgtccagctccaaggccttgttacagctttcgatggcagctgagaaggcctgcagtttcaggtgacacatggccagattgagatgtgaggccagtcggagcgcatggaccttttgcatt

SEQ ID NO: 944 - DNA, 664 bp, Rattus norvegicus
ccccctccccgaaatgtaacaacattaaagccattccaacgtagatctatttctacggctccttgcatatctcattgtagctgaagttagatgtttcagtaacgaaatgaaggttatctcatcaaaatggtggcacatctcaaagacgggtttcttgttcctgtaactctctgcctatccctcaaaacctaaaaccccctacggtccagagctaacaggaagacagcccacagccaaggctaaatcaccgtacccatgcacagaaagggctcccaaacaagcagaggggttagacttctggaacgggcaacttgtttatttatacgggtaagaatagggaagagaagcccccttggttagcgctttgcctccaccccaagttactgcataccaagcggctatgaataaagacaaccagctgactgcaagtcccgcagtgcatgcatcttaaaaagtctctacaacgcggaccctagggagccaccgggttgccagccgagtctgctgtgctgctggggtttggaggcgtggcggctttggcttctagctgttggctttcagtttgtggatcttcgttttcaggacctttcttatccttgtcggctgccacggggcccatgatttcctgcagtggctgctcgggctcaaggttgctgggctggaa

SEQ ID NO: 945 - DNA, 607 bp, Rattus norvegicus
ggccgcacaactttttttttttttttttttttttttttgctggttcaaaaagctttatttttacttggtccaagacttgggagaggctccagggcggttacaaagctgcctagtggctttagaggttcattcgggtggaggtgctgaggcggtcggtgcagagcagaggagggagccccttggaaggcacagaggcctagtcgtgcttcagagtgaggcgctcaaagagatactcgcccagagatgcctgggccacgccagtctgcgctggttgtggccctgccaccctacggaggttggtcaggtggttgcccatcttcttgatgagcttcacctccttatccaggaagtggctttccaagaagtcacagaggtgagggtctgtgcgggcagagcccagggcgtgcagatccaagagggcctggttcaggttcttctccagggccaaggcagcttccatggcctccagggttttaccccactcatcttgagatggcttctgcacatcctggaagagtgcacggcccccgcgttcgttctgcaacttgaggagacgctcggcgccctcgcgcttctcctcggccaattcgcggaagaagtggcctac

SEQ ID NO: 946 - DNA, 663 bp, Rattus norvegicus
ggccgcacaacttttttttttttttttttttttttttaacagcactgtgcagtttattaaccattcaagtacagtagcatctggtgagattgggacagaattgggatcgcaaagtgaacagatactcagcatctaatgggttggaagaagccactacatactcttcacgaacgtcttccacagtcaatacagcactagccattaacccagcacaccgagtgtgcccgagaggaaaagatgcaacgagaaaaatagctacgttagaaagaccaacactttaaaaaagagcaaaacactttcagtttctccccttgagcccctaaaacatctcacggtctggatctacctatacggtcctacatcagcttctagaatatttgtcaggagggaaaaagtaaatgacactggccagtacagtctttggatatttaggaaggggtcggggagaaagtcagttctcggaacaacttagtcagcctcggtctcgtccgcggggtctttggattctttgttcttccgcacctcttcaacgtgcttgtccttctctcgcaaacgctccagcttggcagccatttgcgcctcccggttctctttgttagcctccattttgtgggtcagtttctcctctgccattttgctgaagttgatgttctcctcaatggc

SEQ ID NO: 947 - DNA, 618 bp, Rattus norvegicus
aaggaatggacatttaataatacactgttattaactcacatatcagcacttaaaaacagcaagtctgtactattagttttgaatagtacttatgcattccttgaaaacacatattcagtctgtctcactgtatgctaaattgcatgtagcatgtatttcaatgttatgttctaaatgtgaaagttaacaatgttaaactaccagaatgtaatgtataaagaataatacagaaaccagaagcacacttgcctgtctactgtacatagctcatccaaacatatatgaaagacattcatgaatttattctttcctttcagaacctggcctggatgcttactgcttgaggcatggggccaggtgctgaggaaaagaactagaatgaggcactctggtcttggagcgtttacagacttctagaggtctgtaagatcccataactgtgagcttgcagagatgtttagtgcaaagtggagcggatgctttttgcgttgagtgttagttttggtgtctttgcaaatgcttcttttttttcataatatgcagcttcattcacaaacactgggtacacggtacagtctccacccagtggaataacttttccatcaggagacacaaacc

SEQ ID NO: 948 - DNA, 433 bp, Rattus norvegicus
ggagacggagtcagtgtatttattagtgagttcaccatcaggtttccagcagggattacagtaggagggagtgcaatagggaggtgcaggacctgggcgcccttaggtctcaagaaaggaatattctaaagcaggtacggccaacttaaagctggaaaaaatgggagtggaatcccacagaccactccagaacagcagttggtccttgctccaccttttgctggctttcagaggaggggccaggtcacagggcttcgggggacagtttccagggagattttctacacctggtgactggtgtctctcaggctgacttcaggggctgggtgccgagcttgccagcttccaggatgggtctggctggcttctgtctctggactttaaaagaaggttagttcatcatcgtattccttggggggacagacggcaacca

SEQ ID NO: 949 - DNA, 582 bp, Rattus norvegicus
gggtagcataaattttctcaaactttaatcttcacaattattttcactctatacactttattgaaaaggtctagatttatttgacaaaatgattatgaccagaataaagatatcttctttttcatatatcagtaagtggctggaatagttaatttagtcatgtatcctggaaaatgagtttcaaaatcttcctctttttttttgaggtcagctactgtcaataatggacattaggcaatagatcataacacttcagtaacatgctgtgtcagaaccttgcataattcacacattcatttgctctctgctacattatgacttcatggattaaagtttattaaattccaaatatttcttgcaggagggaatgagtaaaacatcaggataatgctgtcttcatttttaaatatatattgttgttttaattgatacatagtaattgcacataattatggcacagtatgacgtttcaataatgtatagtgtacataataatcaaatgaaggtaattggcatgtcacaccagatgtaactatttcctttctttctgggacatggctattggacatagtcaattaattg

SEQ ID NO: 950 - DNA, 612 bp, Rattus norvegicus
ttaaagtgctcttcagccaagcaccgttatttgtttctaatccaaacactttggggtttcttcccatagcaaactgagtcaaaaatgaaaatttccagcataaaaactgttacaaaccaatctaattcattttgtaaagtgccactgaatttagccttcaagaattcaaagtaatacaaaacttccaatatttttgtttacagaaatatgaaattccaaaaatgggattgttttgtctagagcagctgatagcatttgtcaaagccaagaccgcacactgctgccactgtgggtaaggcaggctgctcagcaccgtccacgctgcttctcagaacaggcccaggccgggggcacagctcagcttcacggtaaaggccagcctatgatctgacaggaaaaccaactgcgactgaagcaaagacactcaagaggctctccacctgatgcaccttccctgtgaggtagcacacgctgctgccactaggacagagcgctgtgactgggtgacagattaacaggggaacacttgagtccacagcactctggaatgcagtataagacgcttcaaagcaagttagagaggaaaaaagtaaaactccacctgacaccacc

SEQ ID NO: 951 - DNA, 594 bp, Rattus norvegicus
acctgtatgtaaaaaaattttattcacagatcagtgttaacatcttttaaaacaaaattcatcaaagagtttgagttaaagcttctggaaagtgaacaccttctaaaggagtctggacaggttctcattaagtcatctgaggaaagtagatggtattgtgacctcttttatgctttctgaaatctcggtacttaaatactgaagtatttaaagcttgacgaactggagcagattcgcttaagaatatattacattactaataatgtgcaattcaacatggccgttgaagggaacagtgtagtaaaaggaacagaaatgagaggtctttcatataggggcagggaacgttttctcctaggaatacatgacacagtcctgacatcccaaactcgtcccctgacccacgttattacacgtgagacaatgtctctcaactccttttgttcacacgcacaaacaaaacctgcacctgtcccacctagccacagatttttaataagtttctcatgcaggtccttgtccatttgatgactagcacagtttagcgcttcagacctaggatgttagtattatcccttttcaataacccagaaa

SEQ ID NO: 952 - DNA, 457 bp, Rattus norvegicus
ctgcacacagttgcgagctttattaatccttatgtagatatgaatatgcattaatacaatttcaattttggcaagataccataagatcgttattcccacgatatcaggaacaactgaggcaaaagtaaacaaaggaatacgactaaacaaaggtttcttctcaaaatattcacataacaaattacccccttcttattatcaaagtatactccccattaccaagagagtgtgagaaccgcgtccacagaaacaggacacagcagaacatagtttaaggccaagtgagaaaaaccttttcttctcaagggtggcattccagcccctacttgctcctgtcaccagtccttacttgaccctgcctgggagctgcatctccatgtctcaacaattccttcttctttcttttgttttaaaagtaacactttccataacatagctaaatgccctggtaggggtt

SEQ ID NO: 953 - DNA, 667 bp, Rattus norvegicus
ccagtgacagatttatataatttcaatgtaaacttttgctgcagcatggagaccggtcatatctcattggtagatgtacccaaagccctcaaccagggcggtgacagctacacttgcttgaaagaaaattagtccttgccagccgcagcaggatcagatcggtatttctccttgccactgtggacagccacaccagtatgacaagttgacagttcccagtgtcttcaagagcctctctaggctactgccagtggcttctggtctcagagctcattgtgccgagcccttgagaccctgctggacaggtcctgcagatgcttcttcaccttgtagcccagctcctttgtcttctcctccagcaggacgtacttctccttgttgcggctgatgtgctcggggtcaccgatgctctccacgtgcttcagcttctggtgggaaatctccagctgcttctggtagtggttgtgcttttcgattttggcctcgaagtgcttaagctcctccctgaacgactccagttccttctcggtgaagttggcagactgagccaggtcccacagatctatcactcggggctcttcaaactcagtggcggggccgtagccctggtggctgaccttcctcaagcggtctaggccctggttgatactacgcaatctgtccttta

SEQ ID NO: 954 - DNA, 641 bp, Rattus norvegicus
aggattaaatgattttattcagtttcacctcaaaaatcatgtttaattaaaaataacactattattaaaaataatacaagacatgtgcattacaaagtaaagaatcggaaaacgttgagggtttagttctaaagaggtcctagacccacatcttatcaccattagcaaggttaggaagttgatttctggctaatgatcatcacaggttctataatacagaacagagaggagttttctaaccatcatcaccacacactaaccatcaacactcaataatagtgtaatatctttggaaaagcgcaaaaagatttctttagtggaatcactttggaaagagtaacaaacaggtctctggattcccaaccttccctccaccatcctgcaaaatccatgctgggttctggcgtgaggtctgggttttaataggaggcacaaggtatgcctaactaaggtcaagctgtgcccaccaccatttgtcctgaggactatgcaacatctctttctgggagccacgttcctcctcaagctggcaccaggctttagccttttccttctcctggcatgaaattcctgaggtaattccagtgtcttgtggtcattgtctcagcagtctatggagccaaagaaagggcacaaaggcg

SEQ ID NO: 955 - DNA, 562 bp, Rattus norvegicus
ccaaaagctttgagctttattttacacagaaaataaaacacaggtactattcggttgtactgtaaacctgagttacattttaaacaagcctatttatcaaaaagttacctaaaatattttttgttgatatgaatagctgtaacggcatctgtcctgaccctatgaagtgtagattttaaaagttaacaaccatattaccaagtgataggccaaataaaatgcttgtgtacaagattacatatatataaagtgttgtatatacaacacgcacattctcaatgaggaaacttttcacccccaagggaatgaacattggctattttttatgtgcaaaataagacatagatacagtacataaaatagacaaagtatatcggtgagggtgcaggggaaacctgttctctctggtatttaagttacataggaattctggaaatgtagctcagttttacaacatttgtggactgtgactacacccagtatggcccacaaggcaagtatccttaagagtgccaatagttgaacaaagctaacccccacttcaaaataaaattctttacaa

SEQ ID NO: 956 - DNA, 601 bp, Rattus norvegicus
caactagtagattttatttcaggtaaataaattcccacatacagtaggaggcttacagcacgaaacagttggcattttattgctagtgcatatagtgtcacagttgatacaatttcattacaagtggaaaaatacactggctgacattggcaagctacaatacatctatatgtcatatatatttctttacaaatcgccagtagttcaagaccgtagaggttatctactgacactactatggcttctcttcaaatataggaattgactacaaatatattctgaaatacatttgtcttccaaagaaacataaaaagtgcacaaaaatatatgtaaaaaatgccttgcaaatagttatcaaaaccaccagggccgtctgtgatcattaggacgtatccaattttatcttggtcccatttctgattggaacccagaatccccactgtggcttcacggcaagattctggcttattcatttttttcatctctgatattcgaaaactcagagcccacggagccactgttgaaatatataggactcaggggcaattgcaaaagtccaattccttaaagttttcaaatttaaaattgcgtttcggataat

SEQ ID NO: 957 - DNA, 572 bp, Rattus norvegicus
agattcccacaacatggtcctctttattttcagtctccctacctttgcgccatggaagaaacaggctgagggcatgggcagaactgtgaactggcccagaagcttcttgctgacatgacagaaaagaggggtgtaaaggaacccccatcttctaatctagttgggggaacaaacatggagtagatctgtgggaggtgggtggagcaacagaggagggcttcctaaagcacaatgggccctgggaatcagtcctctgtcttcctaccagaccctgcccttgaaggcctcttataaactctcagactgtgagctatgccatcactgaggatgaaaaaccaggaggtggacatccatgacattggttcccgtcaaccctgtatgcagcaaatgtgttccaccctggaagctgcaaaagaacgtgtacgagtcattgttgtcgaggaaggtggcaaaatccaggttttcagcagaagcctggctaacaaggtcagacatgacccaggccccggccacctttgtaggcccgtcctgcccatcagtgcctccactcaagaacagcacatcaacaggcc

SEQ ID NO: 958 - DNA, 441 bp, Rattus norvegicus
aaaatgggtaaatgaagtttattttgttcatgattctggaggctggagggctcaaggacacagtggcagcttctggtgagaggtttgtactatgtcattacatagtagaaaggtcaaagggcacaaataaatgcatgaaaaagcgataagaggcagccttgctttatgacaacctgccctatggagactgatccagtgtttgagagcagcactagtctgtttaagggatgtcccagataacttcctccattgccaaactggagaccaactcatgagttctgggggatgtaccacagtattcgggaaggggaaaaccttccttgcagcttactttgcaccagttcaagaaacagtgaagacttgtagataagtaaaagagagacaatcaggacaggtgccccccaagtttttaagtaacgtgagagggaggcaggctcctgg

SEQ ID NO: 959 - DNA, 547 bp, Rattus norvegicus
caaacatatttattatttttacagactctaaatgtactaatgatcctgcaatgcacactggtgtctgtgatgccaggttcagcatgaccatccaaaaggcacctgtctaggggaggcagctttctgaggggatccagaggagcagtggccaatggcaaatacctctgtgagcacactgtctgccctgtgctggggaagagcccccactatgtgtcgcctttggaccttggttgtgagcccctaagaatatttctcaggggattttgatcgacaggatcacactctgtggctcaagcaggcttgtaattctctacatagacaagcctgcctctgaactctcaatcctgctctccagtcttctgcgtactgagaatacaggtatacgtcactatgccccactcctagagaacagttctaaggtcaagacatgatcaagatgcccgtgacaccatggcagagtcatgccaagtttctgtggtttgaaaccttggatgtgagtctcattattcaaacacacagctgcaatgcaaaaggcaccagaaggcca

SEQ ID NO: 960 - DNA, 605 bp, Rattus norvegicus
  misc_feature (1)..(605): n = a or c or g or t
ggctttaaaaatagttttatttttcccttcacagacacacaggcctctgaccataattcatggcaccccaaattaaatatagacttaagagtatatttgtctgacatgattcaagaaagtggattttaaatgtgaatgggtgccaaccatggggactggaggagggtggtaccagcaaagaggggcgtacatcattcttacagcgactcttagacttggaatcaatatgtgctcatcatatacatatttagcccaaatcagtatgctcaggagtagaatttcttctgtctctataataaaaaggccaaagcacttccttaacattcgaaatgtttccctagtagacttggtatagtaagagaatgattgctaaacatcctcaatgtggttttcattatgaaaaaacatgtttcacataaaatcttcataatataatccagaggccaaatttgtgcatgtttaaaatttgagtccaggctagatatttggattttcccccccttccagtgtttttcatttttataaatacatacctagncttctactactttaaacatactcggaactcttttagaaaccatggctgcctttcagtagcatcagtg

SEQ ID NO: 961 - DNA, 442 bp, Rattus norvegicus
ccacagccacataaatgtttattcagagtatgagtcctagtctgggacacttttttgccctttgctcgggaggtaaacctaagcagagttccccctccaccccttttaagtcaacctcctgtccccaaccctttccagcacccaggagtcttttttgcttttccaggaccagtttttgcaccaggaggcattacacccctcccctcccacagggcagccgtttccaccaatgacagagtaacactctaatttaagtcagggcctggagttcaccaagagggggttctgaccttggaataaacccagcagcccgttgtctggggctggctccttaatgatcttctgaatctccttgaactgggggtgggcagcatccctaacaagctgcaaaatgagtgattcgctggtggacaggaaagctccactttgtctaatacggccc

SEQ ID NO: 962 - DNA, 595 bp, Rattus norvegicus
ccaaaaaatcaatacattttatttgatttatttaccatggtttcagaagagacgagagactattaacgagtcgctcttgggaacgacccttacagggcttgttttcatgagtgtcacccaggagagatgctcacccggccagtttgcttttctctgtggctagggagggcctgtcttccagcagggatccatgcactcacagactccaaccgccatcgatgacgacaggggtgccagtcacataggctgactcatctgaggccaagtatacgcagagcagggcgacctcttctgcagatgcaaaccttccggtcttctgtctgtttaggaaagctttcagtgcctctttgggatcatctctggcttgtattctttcttgcagagatggggtgtcaaccgttcctgggcacacacagttgcatctgatgccctgctggatgaagtctgcagccacggacttggtgaggccgatcacagctgccttggttgcactgtacacacatctgttctccacccctttgatgctggaggccacggaagacatgttgataatgttgccagatttttgagcaagcattttgggcaggaatgccct

SEQ ID NO: 963 - DNA, 476 bp, Rattus norvegicus
cttcctccctttcttagatgaagtcttattctgtaccaaggctggcctttaatctgtatcaatcttcttgtcttggtttctcaagtactggtattctgggcctacattaccatgcctgtctccaacaatctagtttttaaaaaaaatatggaaataccctctaatagcatatatgtcatacataacatttcagatcaaatgaccagtagaatttaactcacatttaattaaaacaaagatgccatgagtaacacgagctttggctaagcattaaaattctcttttacacttaggaggagtatacacacaaataaatgatctgagaaatagaaaaagaaatctgattagaatttggagactaatgcaaggagaagaggatattaatacaaacccctgctcgagtgcttgtctggcatggacaagaccttgggtttgttgcccaacaccaacaccatcacacaaaaggaaaaagtctg

SEQ ID NO: 964 - DNA, 411 bp, Rattus norvegicus
ggtatagcagtttttatttcggtttcaattcgggaagagtgatgcccccatgctgacccagcagtgcgctccctcactcaggttggctctccctccacctcaaattctcaaatgcaacgtaagaaaatgctgaagtggggttggggatttagctcagtggtagagcgcttacctaggaagcacaaggccctgggttcggtccccagctccgaaaaaaaaaaaaaaaaaagaaaaaaaaaatgctgaagtatgtttcctggaggcctccttttttactgaggctgtaggggggattctgccatgttttgggcttttggaagccaatgagaaagcatgaaatggtcttatcaatgacactgttgcgagtctgttaaccaacggggaagttgcaagccactcaaacaggcttaa

SEQ ID NO: 965 - DNA, 549 bp, Rattus norvegicus
  misc_feature (1)..(549): n = a or c or g or t
ggcagtttccaagtaattttattcagaattttgtgtttgtttcctgaatcaataaatactatacaaaacaatgtaaaaatggctaccattttctctcccctgctcccctcacctggggacaagtccctggacaacctcattcagggggttctccctgtagatttggtccagcaaatgaggccagccatgttttagccccttgactcacttttggagatttggctggggtaggaaagcctttaggaatgaggtgattaggttagggaaatgcattattgtttgggggggaaggagacagcgccctgggcanaaccctaccccaaagaaaagggtgtctaaaatgttcacggttccttctttttgcctcaaaaagtgacatttattcaaagagagagagagagaaaaaaaaaacaaaacaaaaaaacaaaaacaagatgtccatcccttggctcccttccctcccccctccagctgttcctgagccctgcccccaggactgaaccctgggctagggccaggtagcaggacagcccctcaaatgaggtcaac

SEQ ID NO: 966 - DNA, 364 bp, Rattus norvegicus
tgtataatactttctttgctattcttctttctttttcttttcctttttgttttgtaaatgtgcatgggtgcctacatgtctatctgtacaccacatgtgtgcaatgccttcagaatccagaagaggatattggctcctctgtgcctaaagttagaaagttatgaaccgtttatggggggtcctgtggattgaacttcagtcctctgggagggcaactggtacccttaaaagcatgagccatctctccaggcactttctttgtcattgtcaaaaccaggaacttcctgtgtacttttctatacaccatttccatttctagggttgccattttactattctagcctacacttaaccttttgctgga

SEQ ID NO: 967 - DNA, 657 bp, Rattus norvegicus
  misc_feature (1)..(657): n = a or c or g or t
ttttttttgaactggaaatgatttatttcagagacacacaaggctagtaagatcaagggtaggtaatgtggccatcaccccctaacagaagggtttagctatccaaccacaaacatgaatagggatgtcaatacttatgagtgactctcactcccgttcactggggactaggcctcctttgatctagacactgagccagcgtttgagccgtgacgtccatccagctcaggcacagctccttctgctcacttgccagatgaccacgaatcgtacactaatttggctgcgaccaggtcctccactgacatccccaaagacttgaacaccgtggtcttctcacagtatgcaggcttcgctcctgaaaccacttctccaagctcagcaaagatgtcagcccctgacaacagaacatctcctgactcctttagggcagcctcccgggagtccacatacagcactgcttgcttcatgagctcgtcatccagttctcgccagtcaggtctactggctccaacagcattgatgtgagccccgggcttcacccattcaccaaatacaatgggctccgttgccatggtgactgtgatgatgacatcggcacctgtcacagcctnctgcactgatgaacagacccgaacatctacttgcactgagctt

SEQ ID NO: 968 - DNA, 641 bp, Rattus norvegicus
ggaaaaggtagacttttaataactgcttttatcaccaagttaatcatgcagttacaaagtagttagaaatttctgaaagggtactgttaaaaagaagcgctcattcttatataaataatgtctggtacttctgtggaacactcctgttcaaaagccctggccagtaactccccaaacagaagtcaaccccaggcagtctccagcctgtggatagcgaggtgctgtgtagacggcaaagccttggagaagggacacacaggctgagtctgaagtctgccagcctccaaacagggagccagtcttttcttctgggacactctatttgaagtatggttcaattactcaacataatagatctccaaattggtaaagtggttacttcactctctggactgcataacaagttcccaagtgtccctcccgtgtcacttgcaggtacgcctgcccccaggtgctactttatttctgctggactatgctgcagggccgataagctaaattatactgttttatgttataaaaactagcttcttccatttcctatattttaagcgttcactgcttgagtaaaggttaggcttaagtggttgaaggcaattttattacagcagcatgaactggtttattctgaaagaataaaa

SEQ ID NO: 969 - DNA, 563 bp, Rattus norvegicus
tttttttcatttttagaaaagcttttatttcaaattccattttgcatattgattttttttttttggaagaagacaagtgcattttccttgagcaaaagaattgagttatgatttagggacaggatcttcattcagcactcttaagcaaagtcaaggttagggatgtgatcttgcaggtgaataaatgcttgcttctcccagaaaccgcagcagcggtggttttgttaggatcaaacttgagcttcaggatcttgctgttggggtgccatgggcaggctaacattacaggaagcttacaaggtcagggcccagtgtcccagctgactctattttgggccagagggtgcaagggccttgtcacagcctgccatgcatgcttcaatttcttccacagtccggggtacacatgtcagcagctccatgccactgtcggtcacgacaacgtcttcctcaatacggaccccaccaaagttgcgaaaacgctgtaggacctcttggttaaagaagcaggcttgggccgggtctgccagggcctggtccaggaggtggtcaatcctcgtgcc

SEQ ID NO: 970 - DNA, 474 bp, Rattus norvegicus
tccttggtattttttttttcaagcaagaccatgttttcctaaggggctacaatttcagtgagtctcttcttccggccccaacaaacacccctggctgctaacgttacagacttgttccagcttattggtgctgatgtccaatagccttgggggacctgccttcggctctccacaaggctattttgtttcacaaagtaactcttcaacttacgctttactataaagaaaatgtatccgattctaggctaagtttccaagcgatcctggctcctaggagccaccaacaggagtacccgggaaggccacgcagcagaacttcctcaggcattttcacagccatttagaaagatgtcttcagcgaactcgtccaaattagctacaaacgcttggcaggatggacacgttgtgtctgtgggccaatattcaatccaggtggaggaatctagagggtatatatacttgaaactgaaattg

SEQ ID NO: 971 - DNA, 515 bp, Rattus norvegicus
  misc_feature (1)..(515): n = a or c or g or t
caaggaacacatgactttaaagtgacagaagcccggcttctagaagcatcccccgccccttcccgctatccacatatggtagaaatagccatccttgggagccaaanctctgctcatgctgccaggtctttgggctcctctggagttaacttcatcagtttgtccacgcacagcaggatgagggtgaggaaccagaaactccagccaaccgccgcagcgatccagccatactcgtccacagaagctcggcaacacagggaggctagtgggcagaagtcgacattagcacactgctcgagggtcccggggtctgggtggtgtgtactcagggttgagttgccgctgctggcttctgtaccgcagcacaagtagaaggaggtgaggaccaggctgaataccatggcggcctgcggggcagaggtgaggtacccagggctgcggaggaagacacctgtntgggccatgttgctgcagaggtgctctggggtggggaacatgtgtcctgacctcgtgcc

SEQ ID NO: 972 - DNA, 443 bp, Rattus norvegicus
catgttggaaagattttatttcaattaagcgtacatgtgtatgtatgtacacacgagggcaggggcctatggaggccaatagaaggtgtcagatgccctgggattagagccatgggcatttgtgagcctgtagacattaagtgcagggaaccaagctcatatcctctggaaggaccaaatgccctggtaactactgaaccagcccacctccacattaaaaaaaattgcggttggggatttagctcagtggtagagtgctttcctagcaagcgccaggccctgggttcgatcctaagctctgggaaaaaaaaaatcatcgatgcttaagaagaggccttattgaacattttgcactttaagttcttttttaaacagttattaagctatacattcatttttgggaggagctgtgggtgtcatggcccatatgtgaacatcagggg

SEQ ID NO: 973 - DNA, 475 bp, Rattus norvegicus
gatattctaaagcctttatttagcatcataacacttgttaactccaagacaattaacataacttactggaagctccctaaggccctttagggcaagtacgtcagtcgggttaggttactatgagatcaccccaattaatggggaaaagctactgtacagcaggtctccagtaccttgcaaactcagaatgcacaaggccttctcttacctataatacatgagtgcagcttaatttctctgtggcatttgccactggaagttgaggctaaaggtttgtcattagatagtgatattgattaaaatctattttagggcatttttgtgattttatgtttgaactgaaaaagtctaatgactgatcacaaatgtgaacgtaaatcacaaatgtgaacgtaaatccagagtgctaagagaagtaaatacctgctctggtttagaattttcggatcaggaattctgcccccacccttgtgcc

SEQ ID NO: 974 - DNA, 460 bp, Rattus norvegicus
aacatgacaatcttagcagtttatttacatatgcaaatagcttcacataccttctgaagaatttgaatattttcaacctttaaaagtcacaaaagcatttcagcaattagggggtggtgttggatcagagacttcatgaacgcctgctgggatgacatcatgagcctcatcaagagcctctggaaggcttggggtacctgtgcgagggtgtggagagaccacctttgtgtcaacagcaaactctccatttggctggttccccagaaactttggacagctttgggtggaagcaatccatctctcatcgtaacatcttggaaaacgccggaaagatgagaccaccacagctttcttatgtacataggatgtttggttatttgaaaaaccatcaagattggatgggatgtagtcacaggcccagagattgaaatttctagaaatgtgttgcttttgatctggg

SEQ ID NO: 975 - DNA, 504 bp, Rattus norvegicus
agagaaaataatatcacttttattgaaaacatttaagacattattatggatctcatacatggaatacacttatattttgtatccatttgtctgccagtatttaataagtttacagcccattcaacataacatggggtatataaaaactttggggataattcccaaatttaaaaaaaagtgataacatctatactatatcaacttaatcttacctcaacaggttgtgcagagtcaagagagctctaccacagccccagtaatgcaatggcaaagagaaggtgtggcaagccaaatgttgagaaaaatttttatctgaaagtctaagccagtagagctcaatattatctacatgggatttttttatttgtctggtttttaaaagaggagccaattatttctgagcactgtaaacaattgtactatttaaaggttctctgaaatgactagatgtattttattaatgaatttaagaattaaacccacaaaagcaaatgctatttccca

SEQ ID NO: 976 - DNA, 345 bp, Rattus norvegicus
tttttagtggggggtttttttttcgtctttgataatatgatttattgtccattgacagagcaaacgcataaaaataaaaagaaaggctgacacagagcaatcaggcgcactcggcttgttgactttcaacaactctcatgtacgaatcgccggcggcgtggggcgtgggatgagggggttggggtgcattacaccagctacggctgtacacaggagcatccgtcacatgttcaccttcagcactttcccagtctgccgatctttctccacacagtatcagctgtcatagaactctgtgaaagtggttgctagctcataaatggaatcacacagagtgtggagaaa

SEQ ID NO: 977 - DNA, 687 bp, Rattus norvegicus
gccaaacaagttttaatttattttcaaaggaaaagtaaccaagaaatcttattaaaactatttattcctgtatacaaataatacaatccgatgattctaaatgacttagtttttagagactacccaagattttgaggcaaaatcagataaggaaaaagaaaatatggttaagagaatccagaatcattttggcttcattttagttttaaacaaggtcaagagtgtacccatggaaactttgagaaaaccagtctttgaccttgcagcaaagactccagtagccagaggactcagaaaagctcgagtgctcttaggctcctgctgctttcgctatgttccaagcaccaggtccacacagcatttaagtaggaacgacactgctgatggtaagactgtgtccgaaactccatgacagctctgggaaggcagacgtcctgcggagtggagcatggatggaatcatgtaccttgagaaattctggtctgtcttagacggaatcagtcagctccttctacggctgttgtggcaacaggtttcacgtagtatggcccttcacttaggtacgttctgagcctcaaataatttgagttcccaaagatctctgcaactgtcttggaattggcgagcgcttttaccagttcgtatttcgcatcctttgaagttttgtcatgttccacagaccggtcc

SEQ ID NO: 978 - DNA, 587 bp, Rattus norvegicus
gtgaaaaatgtttttattataatctcaaactttcagtgtatatcttcattacaatcattggtacaataaatatggaaatgctaagcagacaattatcacagtggcctatgggctgagggacagggacccagagatactgttacccctggtacttcctcagggccaatcaggaggtcttcaaagagtatagagagggagaggaatagaaatattaagactgtcagtgcagcaaattttagaatgtccattaaagccatggatataggatttgctataatagaagacagatactaacaaagaacagagagactcaagttttcctgttagaggcagaggaaatattacagaagccagtgccttcctcaggtccctggtgtgtgccccccgcccacccacgaattgtgtaggtcatctccacttgctatgtgcccagccctgtgccagcccaggctctcccaggcacccaccttgcacctcacacagcatagttaaggagtgcaaggctgtgtatcatataccacagcactggttttcctcagtggtggccaggtgtcccacagaatgattttgaatctgaagaaagctgc

SEQ ID NO: 979 - DNA, 629 bp, Rattus norvegicus
aggtctacacagatatttattcttctacaaggctgtgaaataccctaaggtacccaactgggattgaaatggcttcatctggctccttatcaatgcatctcttgctttggcagtcataatcaaaagaagggacagcatccgtgtctgctatagggactgaagatgcatacacaggcagagcccggatcccaccaccaggagaggattctggagaatcaggagaggattcagcacctccatcaaatgtcttcccttctctggtcttcacgagaggactgagggcaccacttggtgctgtttggttgggttgggttgggttcttggctgtagagaagagttgagctgcaagcccagcataagcatctctaggctgtcagcatgccctccaagacaacagcggctccgcccttcatgtcaacccgcccatcaggtcgcagggaaatgtccagctcccctcctcggcaggaacactgaaaggctcgcatctctttcttcccgagctgctgggaccagtaactgctgagaacggtgtgtgcagatcctgttaccgggtcttcaggtacaccaacccaaagcgcaaagtatctggagtagaagtcatatggggtcgtctggagaatactggatgt

SEQ ID NO: 980 - DNA, 389 bp, Rattus norvegicus
aatgctctgaaaacactttattacacaaattacattcagattctgaaaaatagtgttctaacagtgtaaccatctaaaaataagacatcccggaaacacaccaactgaggagaaatttaaaaaaagaatttaaatagagactttttaaaatttctctcattgcaatataatgttagtgattttaaaaaaatagaaggagatttagcagcttttcgtcgtgtggcaggttggttctcttcactgccacaggctgagaatgctgaacaggaaaggcaccaaagaaagacactggcgatgggtgtggactgggagaatactgtgttcaagcagagaatagggctatttacatccaccaactaaaacgtctccaaatgtgaatgagctaaact

SEQ ID NO: 981 - DNA, 565 bp, Rattus norvegicus
aaagaaaaatccagttggaaacacaatttgaaatagaatattttcagtacatatctaagtagtaaaatagcacagcgtaaattttttcattccagtgattcatgtatcttagaattaactttttttattaacaccaaacttgattgttctcaaagttttatagcatagctctgtggttttctggggaagaagcacatggcctttacttttgagcctcagtctatttgtaattaaaataagtaaactgggtttcttgtttatttgggccataaccagtttatacttaagttcactgtgtatgggaactaaagaattctaatgtcatacataatgagacttgatttgtgtatgatactagtcctacaaggtgaaaaaactcctgtgggctactacccccagcaggccaatcccagttattccacttcctaccctccagaaagtcttcctgagctggacactgctccacctcccctggctgctctgagacgcggaactgagaagatgcttgctggctaatcctgctcccgcggaggaataacacgttagggaggattagtgagtcaga

SEQ ID NO: 982 - DNA, 460 bp, Rattus norvegicus
gatcagatgataaatcagcttcaacagcccatgcctacagcccttgcagcaaatagctgtacacagccttgtcccttctgtccccgtctccatccccaggagcattaaggcccagctcttcccctccctccctctgctcctgaccttggggcctggaagggatgggcaagggagcgaaggtttactagagaaaggtggggtgaacgaagggtctgggttggagaggaggactggggttcggaggaccctcaggagtggctagaacacagctctaccctgggctatgctgcaacagaagctgtccatcccagccaccagacccaagcttaaaaccagaactgaccactctaagatctggaccactgatccatgtcaatgcttgttcaaggtattcattaggctctcccttgcccatggaacagggaacttgaggtcaggcaacctttaaattggggggccc

SEQ ID NO: 983 - DNA, 489 bp, Rattus norvegicus
ggtgcccacatttggcaaatgatagtttatacatacacacatttacatatatacatattttaagcttaaagccccagcttcattattaaactctgcttaggctgttaaaaagaggttaaatggcaagaatacatatataaagatcaggaaaacaggaaataaccctaatgtataaaccaagacactttttaaacaaatcttgttaaaacgactacagcctcatatatttacaagaaaagtcctaatgtactcagtgtggcttggcaagctaattacgttcctttttatcaggaacagtcagcgtccagtgattcattcaggttaaaggcatcaagttcacagatcattttatcacatgtatgcctttaaaatgctacacaaatgcatgacagcaatgttcagcttgtagctgaaaattttcttatgctgctggacatttgacacagtcttacgcattttggacaagcgcgctaaactcaaaacattctt

SEQ ID NO: 984 - DNA, 551 bp, Rattus norvegicus
ggaattaatattttttatttttctttttcactttacatcccactcactgcccccctccccttctctcttacaggtggaattgatttttaaaacaagactgaaaagataacctgcatacagcttcaaaaatcagcttccaaacccggtaagattcattaaccacaaaatgctatgctttacttagcatagctctcagtagctagtccacaagaccagggaaagagaaggctgagtgaaggtgggactaagtcctctctgtgtcccagtgtcactgggaaccccaaaaactacagcttcccatggtggtgtatggtgaggtttgagtaaggaaatacacctctcttgtttacagcaccctgcaattggaagcagtacttgggggcgggggtgcgtatttctcccttccctcaacccgttttaaaaaaatacaattaacacagaaacaaagatcccattttttttaaaaaaagtaatcaacagagggcaaagccacttcctggggtgtaccttacatatttacagggtgaggtgtagcatgacctcgagagttg

SEQ ID NO: 985 - DNA, 454 bp, Rattus norvegicus
gggtccctgtggaacaatgctataccctctactttgacttaatcgacctcttcaatggtggggcctgaagaagcaccaccagatggaggagctcctccaccagggaagccaccaggcatcaatgtcaaaagtaacctcaatctgaggaaccccacggggtgctggaggtatgcctgtgagctcaaacttcccaagcaggttgttgtccttggtcatggccctttcaccttcatacacctggatgagtacacctggctggttgtcagagtaggtggtgaaagtctgggtctgcttggtgggaatggtggtattgcgcttgatgaggacagtcatgactccaccagcagtttcaatcccaagggaaagaggagtgacatccaagagcagcaaatcctgaacattctcagacttgtctccaaatagaatggctgcctggacagctgcaccataagca

SEQ ID NO: 986 - DNA, 449 bp, Rattus norvegicus
ggccgcttccattttttttttttttttttttttttttgagttagaatcaagccaccagatttttattttcatgccataaataaagttccctatcactcccattttcttacaaatacatgaaatacagagaagcagaaattcatttggtgaacaatcagcttttgtatatctaagtgccaatgagataatgaagacctgtgaggcactgaaagtaagactagcacaccatccagtaccaagctcttttcatttcagagctagcagacagttgttggtgcctgtctttctggcacatcctggctagttattctagcaccacgagccaggcattgtggattctggacacatgttctagtgtagagcccagtctgttcaatgagaagaatcactactgagcaagcactgctgatagttggatcccagtcaggaaaatggaatggcaagaagga

SEQ ID NO: 987 - DNA, 669 bp, Rattus norvegicus
gctggacaccttaaaaactagttttatatatccaggagggttcagagggcagggctgagccacactgcaacaccttagcctgtctccctccgccttacaaagcaacattgtacaaaactgtatttacaggaaaacaaaatgagaattaagaatgtgtacaaaagtagacaagagccagaaatcacacatgcaggggcggctttgggaataaggaatacggagttccacgccgaagcgcagggccacacactatgtgaaggagcagaccccagtgccaactgaggggaccaggcgttcagctgcagtcttaaacgctacaccactttctcctgctgtgtggcaagagccagacaccagtgatggaaacaagaggggctctctggcgagccccccgacaacgatggattcagaaagcatagcgggtccgaatatcctcaagcttcttggacacttcaggtggggttcggtccagctcttcagagacatttttctgcttgttgggctccatggagttgaactgctcacaaaggtctccatcaatcacattcttaacagggaaataataagaacgaaagctgaagtggtcacgaataataccactgtgctttaaaactaacaaaggcagccaagtgtggttgcgtacacctttaatcccaacactccaggggt

SEQ ID NO: 988 - DNA, 510 bp, Rattus norvegicus
caaggcaaattgatattcacatccaaagctggttgggacggcagcaccaagacctactgcttgggcaggttaggcccttggtgctccagtcatcctgctgcgccaacacagactcggcttcctgctccaagctgccccagtcctcatcatcccatctgtcggcagtggcgctgtcttctgcagcgtccttgtcttcttcctgtgtttcccggtggcctgaggtcgcaggggtggcagaggcaggggctggagctggagcagggtctccctctggcactggtctctggggcacagcggcctcagacggcacaggtgtggggtgtgttcggatcagcttggaggtgagagatgacaccccggtcacagcccagcctgcccagctggctgcagctcctcctgttccagggctggatgctgcatggacgtccttctctatttctgccaactgggtaggatcctccgacacagactctaatttggacaggaagcttcgaatggtcttaaaggcct

SEQ ID NO: 989 - DNA, 527 bp, Rattus norvegicus
gaagaaaaataaatcaattactaggagagctattagttgatcactcatccattgacaactcgcatcatttattcagtgctatattaaacagtattggaagatagattaactaatagctccaagcctaacaatttaaatgaaaattacaaaatgttttgagaccctattttggaatacaaagggtgtttgacttccaatttccattctctgtagaacaagaacaggtcattcctttattgacatgcataaaatacatcacattttctgttctgctgatgctataattcaataccaattctccagccacatcagttatgagcataaagtatatcatgtaacctcaaatctctaacagtggaaggtttagacaagaatggatgctgctggaataatgctgtttcctttgatgtgacagctcagcatccatccccctccccctcagatggcttcttcagcatgttagagcaatgaggattggtttagtctcataaccaagttagagtgaagacattggccacataatacac

SEQ ID NO: 990 - DNA, 460 bp, Rattus norvegicus
cctcaagtttcagagatttattcatcagtgtaataaactcaaaaaaaaatcaacatgatttcatgcattcggagacatagttcctgcttaagtggaaaattgtgcggatggcttctgaaagaccttcattgtaagcagctttgcagtgaacttcacagtttaaaagtctgggccttcttttttcagtttgctgtagtccacgttcacagaatagaacttatattgttcattgggacccagtttgttaaccacagggaaagcacggtagggtccgactgcttggtagacggttcatctaaaaccaaaaggcccaggtggtcaggctttccatcaggacgcggcacctttaaaaatgcatcgatatccccaacagctgggataaaatcaggaatgaaaggtttcagtttgtggtccagatcaatcaactgaggtgtgtaccggctaatgtactcaaagagct

SEQ ID NO: 991 - DNA, 501 bp, Rattus norvegicus
agacaagctggaacttttatttacactaaaagcaaagaagggatacagaggaagggtttggaagccataatggggaagccaagctcttaaactcagttgcagtggggtgtgggccctgctgccggacgcaagagaataaccagaaaaagcgaaaaggaacagtcaaggtgtacagttcaccagctgcatttacttcaagtccctgaagagtccagcccagctgagggagagtcacgtcatgattccatgtgtttcactcctgtgtcctcccactgtcatccaggtgcagcaccagtgtccttcaacctgcctgaggttgacactgacggcagcctcagtcagagggaaactttgctgttgggtgatccatataaaatgagccatttatatgaactgcaaaagtaccaagggacaatgtgctccaagccatttgccaagatatgggctagaagacaaagagcaaggcttgggggaagagctagacagatcaagttccagctt

SEQ ID NO: 992 - DNA, 597 bp, Rattus norvegicus
  misc_feature (1)..(597): n = a or c or g or t
ggccgctcacttttttttttttttttttttttaaaaaacacaactgcagtttattccagccatgtttcccaggagcagagaaaagctacgctccccggggatagcctgtcggttgtatctactattttgcaagcctgaccttgcatttcgaacacctcaaacctcttgttctgtgcactaaggagaaaaagtatcaaatcgtaatttctctcgtaattggaagtagnnntttaagccgaaaggaggccggttttgccgtacagtcaccataacatcactgtcatcgagtaacacttgcccttcagggcaactaaaggtcggtcagctcatgttcctcacactcctcccccatttcctttaggaagtgaaaggctactacaggaaagcaaacattcaaaccatcaaaattcagacaagttatttcaagataataaaaaggggaaaacgtgactgttaggcctgcagagcacagaactgctggaacacagccaggatgtgaggatctaactctgccgtgaagagcaggttctccagggtcaccatgtactgctggattatctggtgatgctgtaggaagatctgctgcagcctctcgat

SEQ ID NO: 993 - DNA, 516 bp, Rattus norvegicus
  misc_feature (1)..(516): n = a or c or g or t
aacactggcacctccacttagatcgggaggcgccgctacccaggagagttttatctaaggaatgaacatgggacagagaatatggcaagaatagaacctgggagttttaagctgacaaaccacttaggaaaagagtggngcgccncttggggcnnantangaattttnntggtttggtttcccctttggcttctccagttcggaagtcacgaacgcttccaagggcccacgctgaacacgcacagacccgtatggctgtcaggctactcagtctttagttggccattagggaatcacactcacgattttcaaaatactaaaattaggttaactaccacgatgccacccaggaaaccaaacacacggaagctacgcgcgctgcgtggcctctctcgtgtgaagaaagtagcagtttctagtaacaaaagccaatactggcgggtgacagggagggctgacgtcggtccactttctaggcaactttaaaaatccatcaaaatcttacgaaaataaata

SEQ ID NO: 994 - DNA, 486 bp, Rattus norvegicus
caccatttaagagaaagaaagatggaggaaaggtaaacagtgttcaggcttcagcttttgccaggggaaggcttcgggtcatcgagaccccaaggtattgccaggtgcacaaatctggattccgtggcaggcaggcaaagtgatcgctctggtagcccttctcagagcccatgaggatctgatctgtccacagaggctctccatggctggggtgtaggcgaaccggaaacctgtggcatttcccacagcgtcgaatcctttgagcatcttagtcatcttgatctcataacgctggtataaggtggtctcgatgatttctggggaacccatgaatttagcccttataaccaggtccgagttgcagaaagctgtctgtgggtgggttggggcacagctacaggctttactggaagctatcaatgatagcaacaagaggatgccagaggccagagatgcaaagggcgccatcgtggtatctctagcgtg

SEQ ID NO: 995 - DNA, 442 bp, Rattus norvegicus
gacagtggtggtgagagatttgattgagatgccttatggagtagtcgcattctgaataaagcaccacactgtgtcagtccgttcccacactgctgctaacacagctggtttgcttagggagtgcccaacttagccagatcaagggaaccccaagagagcaggggcaaatcctgcctctggtgccaagcctcagggcaggcaatcctggagaacactgccagccttgggaagcttgggagacctctaggctgttttcccttcttttcaaatcccacaatttcctgacggggagaagctgtaattagcccagaccaggcaacagatctcagctagaggtacagctgcagggaaaaccccatggaatcttgggaaccagtgtttttccaattacaaggaccgaggaataaactttttctgtgggttctattgaaaccctcgtgcc

SEQ ID NO: 996 - DNA, 481 bp, Rattus norvegicus
  misc_feature (1)..(481): n = a or c or g or t
aaaaaggaaatgtttattgttgtgttacaaggtgattataaactcctctaaaaaaagcaaagatggatttaaaatatcaatatacatattcatctaaaaagcaaaagagaaaaaaaaaaaccgaaaccctgcaaaatgcggggtcgccgtaattaaacatacacagagcttgtatactgcaagacaggtcacacaccaaggatccttcaaacacaaacgctcctccccttcttggttggtttcaggttacttcctgcatagccttgggctacatggaggtcaaaggcctgcccatacaccctggctaaggctcttcacattagcagtgtctttggccctcagtttcctgtggtacaatttgaggggagggtgtatcaattcctagttcccgaaggcttcaaaggaggaaggaaggaaggaaggaaggaaggaaggaaggaangaangaanggaggaagggtannatggggctggggtgagc

SEQ ID NO: 997 - DNA, 595 bp, Rattus norvegicus
cacagtccacagaggctttttatttatgctttacatttaaaaaaagaatcccaggattttccctcctgtatgttttcgtcttgcctcttcatggtccatgatgccagccgaggtcgtcagcacaatgaaaccaaactgccgtgatgggagcagattgttctgccacttctctaggtctttgagttgaacatcaaatctagggcttataactccacacttgttcaaccttcctgtgaggttcacaacaatcttcccagctctgtgatcatcaatgatctcgaattcaccaatgtagccatgcttcatcatcacagttaggaaccgaacgatgactttggaacacggcctgatgaggacctggcgtttgcccctcttctccgcgttgttgatgctcttgagagcatctgccagaacattcattcgcaccatggtgattggcagggagtggctgagccgaattccccgtgccgaccctggccacggccgcgtgggacactcgggactccacagcacccgcagacacgagaagctgcagggcccacgccggctaccgtccccgcccgcccaggccgagcccggcctgctgcagtggggc

SEQ ID NO: 998 - DNA, 492 bp, Rattus norvegicus
  misc_feature (1)..(492): n = a or c or g or t
gtaaacagcagcataaatacctcccgacgttccttccaagccttctcagctaaacttgtgtttctggtgtacatgcgacacggcgacagtgaacacgctagcatttaatttaaaggaaaacaaaaaggtgcaaacggaaagtgccttatcaattcaacaggaaaagctacgccagtcactacattttatattaattaaaacaatatataaacaatatctctttagctatatatagtcttcatgcccatttaccctgtgtaatatattataatgctattgttgcgagcgcttatggagcccctttccacgccatcctgctgaccggcaataatcggtgagagaaacaaaaaaatcttccttcatgacacagaaaagcaagctgtgcaaagtaacgccgtaactctggccatacacaccggggtcaccgattaacgctggactctgctgttacncgtaagtctgtgggcagtgagctgtaagaaaaggggctcc

SEQ ID NO: 999 - DNA, 384 bp, Rattus norvegicus
aaagaggcccaaaacaactttatttgtatatcaactttggctcccatctgactagcccaggatgagggcagcagaggccagccaaaaccagtcagccaataaagacatcgcccaggatccagagcggcccactgggagggggtatgtccatccccatgaagccactcaggcagatcgtctttccagcctgcgataccttgagtatgtacttctctgggtgtagttcaaagttttggcctcctagcttaaaggtgataatgggcaggctggacaccttctcacaagggatcatatactcgccctggatgagaggcactgccccaatggccttctgtagttccttcacctcgtccacaggccccaccagaagagacgtccctgtgt

SEQ ID NO: 1000 - DNA, 512 bp, Rattus norvegicus
ccacgcctctcttcctttattgaggcctagagcccaaatcctgcaagctgggctccaggcccaggccttcctcagggcccacagagcccacgaagcccagggggcacagaagggaaccccctacacacaaggggatccccaacctgccgccccacctggcacacaggtcagaagcccctttggggctggtatcagatctagcttaatccttcttgctcccgtgttgctggctgtggaacttctgatgcaccactcggagggtggtgaaaaaattgccaaggaagaggaggaggaaggggaggcctcacatgagcacctgccactccttgcactcagggtgccgggccaagttaaacaatgtcagcgcattaaaaagctgccagaaatgtccaaagaagaggaacggaagcaggaaggtgaggcctctccacatccaagactgaaagccctccacagggaggtccatggtgtgtcgttcgcccagggctcgcataactagttagcatgccaaa

SEQ ID NO: 1001 - DNA, 441 bp, Rattus norvegicus
gaaaacaaatcatggtaagaatttactttgaagacaatgatagaaagttagtgttaaaaatgctaatgttcatgttttttgcagctattgaagctacaacctgatttgggtttgctattttcccggcttgtgtagagtcccattgcagggaaggcagtaagcctggtaggcctgtctgtgaactgaggtgaaaagcgagggaaggtgtttgcgagcatccaggtaacaggcaatgacatggtccttcaatacagaatctcctagacaccagaggtttcctgctctcactgtagaaagtcttctaccaacctgttgaattcatccgcaaagcgcaagtgtaggttatgcttgccctctggcatcaggtgcaaccatctggcagatgtttaaactggtttatgccgtccacccacttctcacaggttttggcaaagtagtcat

SEQ ID NO: 1002 - DNA, 538 bp, Rattus norvegicus
ccagttcaaagacaaaaactggcttggcagcacagtgctggacagtgcaatccgaggcctggcctcccatccccaacacaggtgagggaagggagagctaaaaagctgaaagaggaaaccccacagaaggaaacattagtttttagttcacactcctgcaatcccctagcctccataaaataaactttctaaagtaaaagcagcagaaatggtgtaaacgctatcggaaccgagagtaactttgctccttccagatgtggtgcaggtccctctgttgaacaccgcttggctggaagcagaattcatcttgcatgaggaaagcagtctttggcctgtctcaggatttctccagcattgcataacaagcagatttcaaaattcattttcttctccaactgcagcaaaaaaggcaaggagagacctttttgtttgaagactctggcccagtcctgtgagagttcgattccattagaacaagcctttaacttgctctgtttctgtgtcaaggtctatatcgtaaaagcagggtcgggtgggc

SEQ ID NO: 1003 - DNA, 587 bp, Rattus norvegicus
aaagaggactcataataactattttaattacaggtgttaacatattaacctaaacttcactgtcacagaaagacatcccataaaattcagaaaatattcaggttgtggtgaggaagatcaagccttttgaagacttcaacgcactggatggaatggctcaagaatttcagcataagttttcttctctttctcaggaaaatcttctggatgtaattttatatacccgaacatgtcatggtccctcacagcatacagatagttttgacgttttaaataaaaatatccagcaaagaaaaaggaagtaacatacagaagctggcgatgcaaacctgctttcatcacaggtctcattcgcatcatgttgtccatcaggcccgtgcagtagcccaggaagccgatgtagacaagccgcgggtcgttcagcttgggcgggggcagtctccgggcctcatccggcaagaatcttaagggctcatggcccggccggccgttcatcatattgatgcgggttccacgtgaggtctgacctcgactccaactataagaaaaaccacgactacaaaccccgcgacctagctcctcgtgcc

SEQ ID NO: 1004 - DNA, 482 bp, Rattus norvegicus
gaaaggagacacaggaagttctttattgtacattggagaaatagccctgtgtgctggttcaaggtgcagcatacagaataaagaattaagaaaagaaggaactgggactggggtggggacctcttgaggtccaaagttgcaaacaaataaaaaaaaaaagtaaaagattcctcacgcaagaggcatttttttttttgcaaataccatgcaaaacaggcagctggcgagagccttaagagaacccctataaataacagaaaagacactccaagcgttccagtacgaagactcagagcacaggggagaaaaggaaaccaaaatgccttttggcgtttcaagatatttggcactctcgtgattacattgttgttgttgtttgttacagtccattaaagagaataaagtgacacgatattgaagaaagaggggttcgcacaacagacccccaaggggaggttagaaaaagctcgagcatgttttgg

SEQ ID NO: 1005 - DNA, 561 bp, Rattus norvegicus
agaaggacaagcaagggaaacaaacatttattgagccaggcactgagctgggtattttcaataatgacagaaatagaaatatagtgaccatattattctgggatgtctaagattccatttggcaagcattatttttagcatgcagtaaaaatgtgagagaaattagcataatcttcatataattgacaaagttttaactgtccatgttgtcccaacaaagttgatggagacaaatgaatagattcttgaaaactaggaagtacaatgtgcaataactcaagatttgcagagtaaaaaatgtaggaggataaatcataagaccctttaaccatataaccatataaccctttaatgctaaaagaaaacagttgatatcacagtagtgacacataaaaatgagtcttttaagttcgaaacaatgttgtttctgataaatacccgactcttccaataccataatgtatttgatgattaaaatcaaatcaagagaatattgatttcttgggagtttggggaaattaaattgcgaatttataattacagatctggcagcaaaaaatt

SEQ ID NO: 1006 - DNA, 495 bp, Rattus norvegicus
cacagctcagttttaggtgttgagttctttggcgtctaggaagaacattctgttgacttcactaatgggaatgtctcttaatgctgggatggcgtcctcttggtagcttttcctctgttggtttttagcatagttatctgtgatcgtatggatggagtcaagtggagaggtactcatcatgttgattccaaataagagcacgtaaccaattacaaccgtgatcaagagatagacaggcaacgcaaccgcccagtacttttgaggccagtaagttaagcctaaggagtttagccaagattcgggaacgaaagcccacacaagatagagtatgaagccaaactgagagcttaggaaaagaacaaagccataaatcgctctttctggcaatggcgacggtgaattttccaccatcttccctgtggctttagacaatctgaggaaaagcaggggctgccaggcgcccccgccgcttggcgcaggcgcacggcgtccgca

SEQ ID NO: 1007 - DNA, 358 bp, Rattus norvegicus
aaaggcatttcaaatgggatacatatattggaaaagcctttaaaaaaaaacggataaacagtgcactaggagtaggtagaagctgactagtagtctacttgatgtcttttcacacttcaaaggcaagatgggaagcatgagaatactcacatagaacttcagggaaaacttgcctcaaattttagtttgcacaacactgaaaagaaacttttacaaaaaccttcgctgttgctcagaataccagatgattttttttctcaatattaccaccatatacataacatttaaataatttctttataaatattttagagcacaaagaactcattttgttgtagtggtggcccaccctcgtgcc

SEQ ID NO: 1008 - DNA, 575 bp, Rattus norvegicus
aaaaaagaatcaaaacagaaactctaagtaccagtgtgtacattgtacacatttaaatgactcacaagaatgaagttttgtttttcatatataaagatgataccaccttgttcttcatcaaaagatgttcaagaattctgcctccaaaccacatacatgactgccattttaaacagaccgaatttcaaacatgcaacaacgccactggtaataaagctttggaatggatgctcactctattatttcactacaaacgagatagaaagccggcgagttggaaattttattctaaagcacaatggaggtggtcattgtctataccggcacacctcactcctctgctgccatttttagcaagtattctttgtcaatcttgaatagtctccatccctcttcactggacagatccgaagcacctcttcttttgtagaagttgatagatggttcattccactctgctaccaagaagtgcatactgctgcagcgacacttcatagcaacctggcttagattcttcaaaatttctgatcctataccaaagcctcggtaatcactcatcacaaagaagtcttcaa

SEQ ID NO: 1009 - DNA, 278 bp, Rattus norvegicus
cctactcaggctttattcaaagaccaaaaggtttaggtgcaagggagggaaaaagggcctggtcaaaaggcaagcccggctggaggcggcttaacggttcttggaggtcagcacattgctcacagaggcaaggaatttgtccaaaaaggcgtgcctggcgggtgtgaaatctccagggtgggggcaagccaaggtcaccaccaggcagtggctcaggaacttgaagttgacaggatccacacccagtttgtgggcatgcaagtcgctcaaagtggaca

SEQ ID NO: 1010 - DNA, 500 bp, Rattus norvegicus
gacggacgcaagatggcgacggcaactatagctctccaggtcaatggccaacaaggaggggggtcggagccagcagcagcggctgcagcggcggcggcggcagtggtggcagcaggagacaaatggaaacctccacagggcacagaatccatcaagatggaaaatgggcaaagcacaggcaccaagctggggctgcctcccctgacgcccgagcagcaggaggccctccagaaggccaagaaatatgcaatggagcagagcatcaagagtgtgctggtgaagcagaccatcgcccaccagcagcagcagctcaccaacctgcagatggcagctacgggcagcgggcactggctatcatgtgccgggtgtatgtgggttccatctactatgagctgggagaagacactattcgccaggcctttgctccctttggccccatcaagagcattgatatgtcctgggactccgttaccatgaagcataagggctttgccttcgtg

SEQ ID NO: 1011 - DNA, 485 bp, Rattus norvegicus
agggccttgctcttgctaggcaagcgcaacaccactgagctaaatccccaacccctgagtcatgaatctaataattgtgattaccctgcacactacttcaaggacatgtaccagccagcagtgccttcactgtgagtctggaaggacatggggcaagggactcacctggaagcccaggcagcgaccgtaaaagcagcctttatgtagagtgacatagtcctgtaggaagtcagcgctgagtccctcatcgccctcaaagaagagcactcctggtcggttgatggtcagcaggcgctgggcgtagtaggctagagcacggagctgggtgagggcagccaggtaggcctccagttctgctaggttgtggctggcacggaagaagatacttctgcggttagaggccacatagcgggatttgtgtagtaggtgtgccaggcagcaacgagctgtgtgcaccaagctacggtatccgttggcctcgtgcc

SEQ ID NO: 1012 - DNA, 526 bp, Rattus norvegicus
tttttttattttttcacaaaatagaatactttttattataaatttcacatacagaagtacaaaccacaaataggagcctctcgattgacatcctcagaaaacctaaaatacaggtacaggagacactttcccaagggtgctttcaaatgctcaacatcaatcattgaaatgccccacgagctcgtgcaaagaggcctccattcctcctccagacactgaggggagacccattttctttatgactcaggaccctggggtgtgtgccctgagagggaccatgacattgtctctgtgttaaagaacttgagaggaatttgcaaaccgcactgctggggagaaaacaactgatcctgcagctgggttgtggggtgaagccaaactgcttctcctttttttttttaaatcttcagtttgctaaaggcccaaatgctatcacattaggggcctttctagactttgctttcaatgattggagaaaagagaggagaaattaacaatgccatcatcttttgtgggggtgggggag

SEQ ID NO: 1013 - DNA, 625 bp, Rattus norvegicus
agaaatgacaccacagggtggactttattttaaagctcacaaggtgttcacaatgatcacatgatccacacgtctcccgtgtcacacctccacgggacagtgcatgtatggtgatagttacagccctgcttcgcatgctgctacggttcactagctgttgtattcttggtaataataaagcaaatcactctactggacagacttaatttggaaagcccttatgcagatcagactcagtctcatatgaacaaccccggccacacatgcggaaatgaagagcaaatgcagaagaacacagaaaaccccttggcaagaacagctgctgcagactgagcccagcgctgtcagtgcagttcacgtcctcagaagacaaacgacctccctcctcagcatatgagcagcaatactgtacagagctcagtggggtcccaactccacaggagcctgtcaccaaagtcactctcatttagggtcagagactacagactcaagctttttcttttttccctcataatacacaaaatgtctagacagtctttaaaaaaaaaaaaaaaggaagaaagaaaatataaatagactcagtctgtcatacagaatcacatacaatggcaaacacatttcatga

SEQ ID NO: 1014 - DNA, 548 bp, Rattus norvegicus
gagccgtacacttttttttttattattttactattaaactttctgtaaatttgaaattggttaatcttaaagaaaaaaactaaccatatatttgtctttatacattatatacactcaagaaataaatagtggtctgagcattttttttttaaaaagcaacagatatacaaaaaaggcttcaagccaaatggataaatacacgacccacagaggattcagctctcgaaccttccattactaaacacaagctggacatcacaggatgcatggccaataacaagcttcactttggctaaaaggcagtcgcaaaagcacacccggggctcgagagggcactttgtgtgaagggtcaactggctatgtcttcaggactttggcatgaagcagtgatagaaaattgggacggtacagatacgaagaaagcccatcacgaacctaaacacagtgatcactctcccacccccaagccgagagcacactcacaaagccttgccccttctcccatgtgctctcctgcttggatcttaaaggaaagggtttggatttta

SEQ ID NO: 1015 - DNA, 652 bp, Rattus norvegicus
cactacaagtcattttaattctaacacttatgtcaacatttacagcataaatcactcatgttataaaagaatcattccttcatctagaatgtgattgaaattagatattggtaaacaggcaatgtaaatacctcagtgtttgcctctgatagtttgcaatgaccaagacatgatactatagcctcatcaagtgcaactttgtacatgtctgatgcatatatgttgtgtacatgttgtggactgagaggacatcttcaggcactggtcctcacctcctaacttgagataatcttgtttgctgttgaatgcatcaagctagctggcccatggtcaaattttcttcctgtactaaaatgtacggcagcaatgggataaatcttaggttaacagtatattcagatgcactgtgtatagcaataaaaagctccagtgatgttctctttctaaagacacactgtccttctggggaggtgggatctgactctaatctggcaccatgtctagctcattttacaaaattaacctttacaaagatctacatcagcatctagaagagtcaccaatcaatgatcaagaaaactgttatttgcttttctttctttttgactgggtaatttccttaagctacattattatgggctaactggaaaac

SEQ ID NO: 1016 - DNA, 570 bp, Rattus norvegicus
ggaggcacagctggttttattgcagatctgatggtgaaaggttaggtctgaggtcttcctagttggacactcagctggccctgtgactccagcacacaccgacagcttcaggggtcccaggcccctctggtctatggctactgctcccaccttgggccttgactcgcctgaggatagggcggcctgtgttccccatacctctggggcagatagtcccccatccacggggctcaagtcttcccctcctgcaggggagactggtccccgcatggaaaatctttaggcgggctcatgtgccactgggctatggtgagccctcttcctcctcagggattgggtgtcagagcatcaggctagtgttaaggtggcttcctggtctccttcttcagcagggagctggcagcagccagggctccaccctggacgaacctcacaaagttgtccccagccaggggccctagggcatacaggccctcctgttgagtgctctcatgggtgaacgggtccacatcgatggggttcctcttggggctcagtggctgactggggtctatggccaggtcagcccct

SEQ ID NO: 1017 - DNA, 655 bp, Rattus norvegicus
gaaagtgaaagaggctttattttcaatatcatataagtcattccatttaatatttatagtgcatagttatgtatgaaagcatacacggaaaacattaaaaaatacccaaggatgcgcgtgcacaggcaaagaagacagcctttgtgtctatagcaagctcagaggtagcacaagagagtatccatctggtaacattggaaatcatgcaaacaactgagtcaaggcatggcattaaggtgacatcagcatgagttataattccctgggtacaaaacctatatattctttgggtttcaaaaaaattaaatgaatggcctacttttatcttctggacaaaaaaacaaaaaaaaaaaaatctctaagagcaaagtgcacatattgtcctaaccacatacatataaaatattcaaggccacagatggaggtcgctagatgacaaaagaggatactgagaggtaaagtaaccagagagagatgcaggagggaaaggcccctctgcctccatgggggatgcaaaggcttaggcactggaacacccaacgtggaccacactgcctgccacaaggaactcctcactgagctgacgtcaccatcatcaaaccgctcgacaggcggttgtaacttcctttacatttcccatgggggacaagcatgg

SEQ ID NO: 1018 - DNA, 428 bp, Rattus norvegicus
attttgcatacttttaatttcagaacaaaataaaacaaacaaaaaaacacaatacacaacacccaaccctgctattctgtgggaggggatcttcctgccttaaggcacaaggacaggatagaagagattcttgtagacatgagcagagagccaggtgggtcagggccagtcaaggctgttgggggagccacagggatactatacagagggcgggggcttcccaggagcctttaatccacttcttccatgcgagaggcatcctctcctctaagtactctgtctggtcttctttgaggtgaaggatcactttggtaccccggccaatgggctcaccgtggtctgcacggacagtgaaggatccaccagcagaagactcccaggcatactgctcatcatcgatgtgcttcgtgagtgtttcttcaccacct

SEQ ID NO: 1019 - DNA, 481 bp, Rattus norvegicus
agagtagaggaaaatctatattcattaaactaaaaattattgtctattcaagttactcctgtggctactcggtgcacatattttactgagagaagaatagtcaggcttctatggaagtctgtcccaggggtgagtctgtcctgagcccagggttctctgtctcttccacagaggctttcactaatcagcctacccttgagattcattgacctagcagcacacacatccaggggtcagaggccagggcaagttccagacccttgctcttttgcagaaatgttgtccacaaaaggaaagaccaaagttgaaaaagacactctctacatgctgatggaggagtgtggcagtgagagagggaggggacatgagagtggcaattgacaaggacagtcagacagtcagtcagaagggctcagttgacatggtcacttcctgagtaggatatgaaggaatcgtgtattagtgggtctgcagggaaggt

SEQ ID NO: 1020 - DNA, 568 bp, Rattus norvegicus
cccaggcagagtgaagaggaagaatgccaagaaaggccagggtggtgctggagctaaagctttgctgtcatggtcaggagagaggcttggcttcctcattttctgttttgccttgctgggaagcttgagtcagatgggaagataagcggatatgccgtgtgaactctgaggaaataagagctgcttgaaactgaaaaaaggaactgtcaaaataaggacagctgttttgctccttctgtattttagtcctttcttgaggagtcaggtcagttaaagtactgtgaagctggcacagtctccaggcaatggcaagtgatccctatctagaggtttggctgatggtaattccttccatggttaagtcacattgatgggctacatgaggatgtgatttgggtagatcaggaagcagtcaccttccaaaacaagctgtcattaaagtaatctccaggcagcctagggtttatcagggctgagagttcatggtaacattctgcattctgttttagggctttgacccttgacccgaaaaaatggaaaacaccttactgatagagactggatagca

SEQ ID NO: 1021 - DNA, 555 bp, Rattus norvegicus
acacgcatccattctaggcagctttgcctaccctaatgccacagtggccaggtgccagacctgaaaggaagcacccagggggcaaggtctaaaagacacaagggacagccctttctcaccctcaccacgaggaccagcacacatttggtttcacctgagacaggacaggaagaggcctcagccacatggctgagtgcacgtacaaagggcttgagtcgtaagtgtcctgatccctcgacccttccacatttggctatttttggtttcattattaaaaaaataaagtgacaattactggcagggaccagttcttgcactgtcttctgttaaaaatatggtaggggtatgggtagccttctcgttggccaatctacttcacaagatatccgcccgcttgtcccttgcacgactcccggccttggtccgggctttgaaggccgcagcattgtacaggtgcttttcaaaacgtgaaatcttgcaggccttcagggcagcagcatccagcaccagcacagggcccatgccgaatatgtcaacggagaaattcattattct

SEQ ID NO: 1022 - DNA, 472 bp, Rattus norvegicus
aaggcaaggtctctgtcattagggctgggagagatggtacagatcaagccaaacagtgaaaaataaggcaaactgtagcttcgggttttgagcctggcaccaggaaggcctcttcttgaggaagagggggcaggcagtggcaaatcagcagacgagatgcaaatggagtaacaatcacagttagtggggtaacgagatcaggcggtaaacccttaaagcaacacccaaggtccacgtctttgcatgtgcagggcacaactccagcagcagtttctgggtttgggggtttgttacttttccgactttccccaccccctaaaagacacgaagacgagctcatgaagagatcaaggaagggacgtcttctggctgcgctgggcaagggttgggtgacttccgggagcacttgtctaccttccctgtggctggccgagtcctacaaacgtttgtaggtgcccaggagcgctttgca

SEQ ID NO: 1023 - DNA, 620 bp, Rattus norvegicus
aagtcaggtaaggaatcttcacattgttaaacaccagctgtatacatctataagggcatgtcagcaaagatggctgagtataggttagcaagtcccaaagatattcaaaagctaacacagtaaaggtcatgcgaattctagcagtgaatcatgataaaggcgcgctctattcttatgttcaagatatacattttacccgataataaccttatgagtaacagaagctgttattcagacacacattttacccaagactaaaccttagcaactcactgcattgattagcaaaggttattttagagactgatatggcaaaacgcacgccctttattcatggctgaaaatcccactatgcatggtgatacttgtgaagactgaaaataatctggtggatgtaacttgggtgagtggtgccaagaaccctgagagcctagtgatgttctcaggtggcagctttgagctgccccatgacaaaactgactagatgcggaatgctgggtaactagtctttgttaatttgatcttgctcattatttacataatttatagccaccatagtgatgggcaggtacataaagatccttttgcaagctttgtttcccaacacccgttattctcta

SEQ ID NO: 1024 - DNA, 589 bp, Rattus norvegicus
aaaaatataaaatttattcatagtcactttcacacagggttactctcgagctagcatcctcaagagctcacagcagtaatagatcgctatcaaatatagctcatgctattggacttggagaacgctcgtttcccctttaaaaatgttaaggctcagtttccaaaaggtagttattaccatttagttttctgctgccaaggctggggagtttggggctaaacggcttacagtgaggttgcgggtagggcggcaggaggcaagctccacatagctcactctcgcatcgtgcagagagtgccgttctttttcttaaaggttccttcccttggaaaaagtcattttgttacaaagacaaacaaaacaagcaaaagtaacaatcataaggcaaaagaaatctttagcacacaaacaaggaaagctaacagtgctttttccattgcgtctggatgaaatgtgttgtgggaacaaacgccgctcctcgcggttcttaaatgaatctgaccaatcagcaccacttcccgcggttcttaaatgaatctgaccaatcagcaccacttcccgcggttcttaaatgaacctgaccaatcag

SEQ ID NO: 1025 - DNA, 528 bp, Rattus norvegicus
gcccagccctatctaaacataaaataaaactacaggactgaaattaacaacccattaaaatcggcaataagttatgaaaatcataaagcttttttttttaagtaattaagggtagttaaattatttaaagaatacaaagtccgaacagcttggggtaaggtatccagaaaggcttcccggagcaaagcagtggcccagagggaaaccttcgagtttgaaaggagggagcacatgacatggagtgcgggctggaagtctcacccagaagataacatttctgcaggtatttgtgagagcaacagtagcacctgcacagtgggattgtggggaggaaactgcctgtagaaaatgcagatctttacattaaatgagacaagtgcggaacataactatgttaactaggatagtgtgcctaccacgggtatcagacggttaaaagctggtaaaagggaatggtcctaaagaaaacaaaaacagcattgccttcgtctacccagcccagacctcatccgtcctgcgcactgaaaa

SEQ ID NO: 1026 - DNA, 584 bp, Rattus norvegicus
ttgactcagaagcagacgtttatttacttaaaacatttcacaattatattgacaattatttatttaaaataatattctaaatacttacaaaaataaatcaagtattgcttctagttttcaagtgtgacagcatttgccatagaaaatagaagggaccttttgaataaactaaacgctacactgaaacttcctcaagtttaataactacacactatttcctctgatgacttgtgctttataaatgtccaaactatttctgtgcaacaaacaggatcacagtaagactgaatgtataacaagccatatacattcatttttacacaaaatgtcagtactctggcccaaaccaccatcatccccaaaatgccagatacaccattatacagaagtacatgtggttgtgaagtttttaacatccagtcatcaaagaccagatatttattattaaagtatactcagctaaaggttgctaggcaagacattttttacttacattaaatcattagtcaaatcattaaaaaaatagaataaacttcaaatatgtctcaatacattaagttaatcccaagataaacatcagtgtc

SEQ ID NO: 1027 - DNA, 463 bp, Rattus norvegicus
ttaaactaaccacctcattttattgaatttttcatggccaagaaacaagggaaaggaagacccagggccaggagcactcattctcttctaggccatgttccagtttcttagcttccatccactaacttctactacaccttctcatagctcttgctggtagtaacacatgctgtgcccacgtcctcaacatttaggagaaagtgtacatttgagtgatagaaagcaaatgtcattctagctcatgctaggtaccctgaactcacatatatatcctgctcataccacaggctgctcctgctgatctcagcttagcagtgctgacatctgcaactaaagtgaaagggtaagtgctgagaatttgtgacccgaaacgtgtttgcctttccgtcttccgagccatcgtgcaacatgctgtgttctccatattgcctggttactgggagtaaaaggatgcccaagacat

SEQ ID NO: 1028 - DNA, 426 bp, Rattus norvegicus
ttctctcaagacttggtagttcaggggaagatccatccccagtggctcttcgcttctttctaatactggggccatcgttttgctcagtaccagaggtacaactgctgtcagtggctgcatcagctaagctggagactgcatgacctgaagatgatgcagttgatgaaagtgggtttccttctccagtgctctcctgggtgtggtgctctgatagtggggtagtcctctcctggctatgcaggtctctggctgaatgcatgaaaggcattatgtgatcagatggtaactgtgcgctatgtcgccgctgggtaggaccggtgccaaccctttcacctgttctgacagagggagacagaggtgccacttccggttcaagatacatggctgccttctgagatgcagtactaggtgaaggactctgctggg

SEQ ID NO: 1029 - DNA, 498 bp, Rattus norvegicus
ttcttttacaaaaaaaaatataataacttagtttgcattttacaacatttccaatgggtcagggcatccttgaatgggacctaaggggtcagagcagcatgtacctcccttcccagttcaagcaccaggcggggctcatgccaccagtctgcaatctctatcgggatttgatagagcaactgagccatggctcatctgaaggacagcagtacggtgtcaccctgcaagtcactccatatttatttcacaagggtttatgcccctttcttctgctttcctgtacatcttttgaaagtcactaaagcgtggggcacatccaagttgtgcctccccaaagtgcacatgtccagtgaagaggaattctccatgccctggtcgtactccacactgcaacagtgttgtgacatggcccagccagtggccactgtcctcaggagctggctggaaaaccctgctcttctgcctgtggagcctgctcacccgtaggtgaatgactga

SEQ ID NO: 1030 - DNA, 449 bp, Rattus norvegicus
ttggttctttttttcggagctggggactgaacacagggccttgtgcttcctaggcaagcgctctaccaccgagctaaatccccaaccccgtttcaatacatttcaatacgtttagcagaagtaggactatgaaatgccgctaaccgcaatcttcctacctcaggccctttacgaaatgcctttacaggtgcgtagatttttaactcccttttaaacaaatcgattcatcaactgaagaccatttggaagatctgctaaaaagattctcctttcacaaaaacaagattccagaaatctttgcttcgttcttccaccacactcactcctgatttaaatagcagaaagtgagtcaggatatggataccagattagaaaaacatatctgctcagaggcaccaggcagggtcaatgttaaaaatcttgccttaattcatttatttattttttag

SEQ ID NO: 1031 - DNA, 336 bp, Rattus norvegicus
ttaagtatgagtgtggttcatgcattattagggatatacttatgttacaaagtatctgaggtggacgtctgaagttacaatttcagcggatgtttttatgttcattgctaactacagtcctgcaagggaaggctctctcccactgtcttccttgctctgcctccagcctccaagtcacaatgctgacaaagccaaatgcttggatgagtgggttccttcagcttttcactcctttattcagccaaccacttactttacgcaccagtggggtccctcaaaaaccacggcagacaggcagtccaaaggaggaagcagtggccatgacagatacttaca

SEQ ID NO: 1032 - DNA, 278 bp, Rattus norvegicus
ttgcaagctttctgagcttctgcattcagaccacacagaacatgtaaatatttatacacagaccggagaactagcacacgccttacagcctgtgtgtcccctgccttcctctctcttctctcttaagaagtgcggagtgtttttttttcttttttgcggatttgcctagaggtgccccaggcccccgctcctagagagggtgacctttctgtttctccttctccttgttctccagaggggcaatgtgagggtgatggagccgggtcccttctggtgcc

SEQ ID NO: 1033 - DNA, 442 bp, Rattus norvegicus
ttcacagaacaattgctttattttcacgagtaaaagcagtggctggaaacaggaaaaagcaattcccgcagtcacatgtatgacaaatgcagcaggcttttcctacacatgaaataaaaagtctttcagaaaacatgattgggatccaacttcaacaggacaagcacaaagtgcccacgcatgtgccagcatgaaatccacggccatgaactcagctgtctcttctcaactgtccccaagcatcgctccagaaacggtctcagtgctgcccaggtcccggctaaggtaggccacccccggttcctggccgtaagtcaccttctatatctcaatcttcaagcaagtagttcgggttgactaccaggtaaggatcttcctcatagctctcgcttccttcactggagcctttcagtccagcctgggtgagctcaatcagaacgtg

SEQ ID NO: 1034 - DNA, 413 bp, Rattus norvegicus
ttattaaaaaaaaaagttttattttggtttacgtttccagagggatgaatccatcaaggcagggaggcgggacagcagggggcaggcacagaagcaacaggaagttgaaaattcacatcttcaaacacaagaaggaagcagaaagggggggtgaggagaaagcagtgtttgatatttcctacacacacatgtcaacattcaccgttcttagaccactgagtcaggctctgacatccttctgagcctcacaagggaatggttttgccattcccatgaggccatgcactgaggtactaaacatggctgtggccatgtcaacaacatagccccactctggacctcactctagacactgtaaagaggacaggaggaccccatgcatgtaactatggggaaagctatcattcgcgctg

SEQ ID NO: 1035 - DNA, 567 bp, Rattus norvegicus
ttaagatgttaattgtgctcagggaagccagaagagtggggtttcttagaactgcagtgacaggagttgtgggcacaccgacatgggcactgggaatcaagcttgggtcctattctaaagatatatgtgcttataatctatctctaagtgccaagctctggtgggaatggagtagcatgattcctgcccctgggacagggccctggtgtgagcctcccggagttgctcagcccagtgtggcaagtatccagtgtctgtcgtctgtgggtgtaaggcttgcttgagtaataatgtatatcttttcacatcccttcagggaatgccccctctctgaatgttaatgactccatgataatctgaggcagcctgagtccaggaggcaaaggcgtggctaatgtctcagtaaaatggtaaacctgggatcttcaagacagcccttaaggctgtggaaaagaactctaaatacatgagttcaaaaatatttaattccaggggttggggatttagctcagtggtagacctaggaagcgcaaggccctggggtcgggccccagctcaaaaaaaaaa

SEQ ID NO: 1036 - DNA, 548 bp, Rattus norvegicus
ttagtggtactgactgtgtattaagtccttcctccccaggcaggtccatctgtcacctgagaagatgtgggctgacactagatccagtttcttggctgtcagtgtctctccagggccttgaccagaaggtcattcaggcggcctaccatggcccggggatcatcaacgagtcctgctgctatcatggcgttctcatagatctgatccactagcagctgggctagctccggctcacgctccctcagctggttgagtttctttattagtgtgtgcctggggttgatctccagtgtgggctgtagcaactgagcacgctcctcctgggtcttggccagctgctgcatgcgcaggaaatgtcgagcagcccccatctctagcacggtcaccatggcagggtgggtgtccaggcggaaagtcaccttcacattggtgacacgggaccccagtgcatttctcatccatgccattagctcttctgtttctttctcagagaggcgctcaccagctggagatgtgtcctcaaacttttcctccttgtagtgatcaac

SEQ ID NO: 1037 - DNA, 595 bp, Rattus norvegicus
ttgcacaaattattttcaattttatttaaatgaaataatgttctaatattatgaaaaactgtcatagaaatgacacaacttttattggaatagaaatttaaagacaaagttatagtatctattttatcctccattaattaaatgcaaaagctatgcatgtcaaattgctacacacatgttggcattatacaatgtactcagtatacttctttattataaataactgaaaacaatatcttatttttcaaacccacataacaaaactgcaaataccacactttttttcctcctcgtttcactttattttttgtaatatggatggaaaaacagtttaccttacccaagattagttttaaaacatctgtgggcgcaaaaacagcaacaaccacagtcacaaaaatactaattttctttcacctaaatgaaaaggaagattttacagggctcagcttaagagagttgtgacggagttactaacagtagaaaaactttgtaacgcctggacaaaacactcataaggcaaaatggtcttttttgcagatataagtataagaaagatgtgatggtaaacagtacaaacctttttctaaaacca

SEQ ID NO: 1038 - DNA, 393 bp, Rattus norvegicus
ttgatgctgggaattgaacacagggttgtaacgctctatgacagctacagcaagcacgtctcatcctcagctgttcaacttaactgcaaggccagtatgttcctgtcgtctcaaagctgcacctggggaagcatgagcgatggcctcagcctgcagcaagtggtggtcatgcctgtgcacaacaagctggagcggagattggtggggcttgcacacccctttcatccgcattgctttaaatactggacacagcctttgcacagtggcccctgtggccacctatgaacactgcaagtgtagtaaccggatgtgtgtgggcaaacaccttctaaaccacaccagtgtacccgatagccagagcctaggatcacagtatagagaggtgactcaggg

SEQ ID NO: 1039 - DNA, 432 bp, Rattus norvegicus
ttgtacttagaagaaaaaaatcaaatagtaaccatacacttgaggaataaaatgttacacaaaaagactttcctcagtcttatttgtgagaggaaaatggaaacaattgtcctgtcaaatgatgacacattaaggtaaaacattgtagcatttttgtaaagaagaattcaatctggtaaaaggtgagaggcttgacaaccatacatttgtgccttggtttttgagaaggatttgctatagtctaggctggacagacaactcaatcctggatcactggagttatgaagtttgtgcctctgtgtttttctggtgctgagactcacatatgctctacacaaagctttacttcgataacattagttttaaaggctagaacatgaacaacataaatgctatgtttcccaacatttaaggaatatataaaaattactt

SEQ ID NO: 1040 - DNA, 528 bp, Rattus norvegicus
ttcctatcttctcattgattcgtgaatttctattaaagataaatatcattaacaaatcacaaacacgtacacccgctcccaaaacacagtatagtcccctgtagaacctcctccacatacaggcaagtgacaattccaaactccagtgacatagacattgaattttttatcctttaggaaaacaaatttgaccacaaagtgtccacagcttcggatgagtcgtttgcagtcatggaaggcattttttttaatgtgaaatgaatcagctctcctcctctgatagttccctgaagcagcttctgggctcccctctgtgtgggacagaggggtggtactggatgacatccagggcagggtaatgtgagaagggtccaatccagtgtgcgcatcaccctgagcatctggtttagcttcatttctgttaccatgacaaagtcaacttgtgggagagagggtttatttggctcacaagtccaggttgtggtgtgctattgcaggcctttcaaggcaggaacatgaagttgatgg

SEQ ID NO: 1041 - DNA, 468 bp, Rattus norvegicus
  misc_feature (1)..(468): n = a or c or g or t
ttgataaaaccatgtttattactctgctctgtgttccacacaggtttacaagacaaccgagtgtgaatgacaaacattttgttcttcgaaactctgcagtgggactgtgaacaccagccccaccgcaccctgacaatcacacagtgagggtgaaatatcagcaggggtgacagagcaggtctcggccagcagtccccatctgcagcaaaatggtcacgggctaaagcatcctagacaaacctatcagcacccatggtgcacttagaattgaacatagccacatctggtgaatcttctcacttcttccttctctttgntgaatacagtttttcttcaagagggactgggactatgccgtcacactcttttacttcctgggtcaagaggtgtttcacaatatttggtctaaccacatcagtgtctcgtgccaagtgttccagcatgctttccacaagcattgttggggca

SEQ ID NO: 1042 - DNA, 313 bp, Rattus norvegicus
ttagcctgatggattttaatcgttagcttgctgcatcttccgacatttttaaaaatcaagtcacagctgtgtgaactttacactgtgaccatcataaacaaatataaaaagaagcagacatgacagatgaacccatggctacccgtcagtccaaagccatctaacatgaaagaccagtaagagactgggcgccagtggaacagagttacagcaggggaatggcagcttttgctggcgcctgtgatttggtttagttaaagttataaagcttttgtgtcagtaccagagagccagatttctctgcaatctattc

SEQ ID NO: 1043 - DNA, 315 bp, Rattus norvegicus
ttgggagttacaggaaaagagcgctgtgagtttattttttattctttttcatttttttatttttgagacagagagtctctctatgttgccctggctggtctggaactctccatgtagaccaggctagcctcgaactcatagagatccaactgcctctgcctccagagtgctgggatcaaagggtgtgcaccccccaatacccagccccttctgcatttattaaaacaacatataacacaaattcagtcctctccccatgtttggggatgggtactgaagttcagtacattgcccctttctaggcctttgagtgag

SEQ ID NO: 1044 - DNA, 281 bp, Rattus norvegicus
ttctggaaaaacttcagtttaataaacagaactaaatgggaactcactctgcactggacacggcaccaggcatgagtgtttgagcagagggcgtaggtcttcagtcatcaggcaaagaaaatgggccacagtgggtggcacacacagggggtggcacacacaattcctaggaacaagtgttgcagactccccacgtttagggaacataaaacagtcaaaatgtcaattccaaatacataatagaaaaactcataggctctttggacaaaacccatcaagcg

SEQ ID NO: 1045 - DNA, 446 bp, Rattus norvegicus
ttatttctgaagagaaaattttatatttcagagtatcatcaaaattattttccttttctttgcatccattagctggagcttcagctgaatgtgagttgctgagccgtccagattgatctgaaacaatatgtccatccagcagcatctaggctacatcatcagcatcactgtccacacacagggatggcaggtagaaatcataactagctccccatgttaatattcctctgaaaatggatattctgggtgaccagcaagaaactctgctgaaagatatcgaaaatttttgttcaggccatctagtgtttttatgtcctcaggagacaactgaaagtcaaaaacctgcaaattctctctcatctcattttctttgaaactgggcgaggggcaccaccccacgctgaaccaggtattgaagggcaatcaaggcaaggcttcgcttgttc

SEQ ID NO: 1046 - DNA, 401 bp, Rattus norvegicus
ttagactaagacaatgctccggctttaatgtatgaaaataatacccatgttgtctaatttgggggtcatacattagaagtgtaaaggtctgcgtctgcccgccgtctagttgaagtacgtgagcacaatcatttggatcggctgtctgcacacggggcagggcttattcctcttctttagcttctttgcacacgtgaaacatgacatcaggtgtccggttttgccgtgaacaatgcaaccatttttaggccgcccctggcaaatcacacatggctcgatggcgttcagagagaagctggattccatactttcctctttgtcttgtgtgtcctccttcaactctttgccactttcttggctgctgtaaacaatgctactggaagtcgacggctgggaatagt

SEQ ID NO: 1047 - DNA, 543 bp, Rattus norvegicus
ttagagagcatcagccgttctatttcttgcatgatcattggcatgaaggaaaagtccaaaacaggggctttgcattctggggattgcgggccaagtgttataagctcctcatagcactttgcctgggttcatgagacctcggggatccagtgtgtctttgagttgcctcatggtctccacacccacaggacccacttcctcttgaagcagctgcctcttgcccagaccgatgccatgttctccagtacatgtcccatggagtgccagggcacgcctgcccagattttctgcaaaggccttgaccctcctctgctcctccacatcatctgggttgaccaacaggatgcagtgaaagttgccgtcacccacatgcccaacaatgactcctgtgagttttgaggccttaagctcctccttggtctctaccaagatctctggcaaccgggagatgggcacacacacgtccgtggaataggccttacttcctggacgcagggccaaagctgcataccaagcattgtgccgtgcagcccaaagttcatt

SEQ ID NO: 1048 - DNA, 402 bp, Rattus norvegicus
ttaagaatataaaatattaatctttaataaaatctgttttctacaaaattatgattctcaaggcatcaatggcagggtttctgtacaggagggctgcagtcgtgggtcacgatgagtctctcacttcttcctgttttttccccccgtaggtacctcattcttcttgcccagaatcttcaggagtgccttgggcatgtagtatggccgctcttgggaaccgtcattcctctccaggtcctcaaggaagcagaggaagagcgtgtctacacacattccaaaaacgctgaagaagccactggcaatgacataggctcccatgatggaggtcatgatgggcagccagtaatagttgaggtcggggttcttaaagtctttccccagtcccttgataccaccggagaa

SEQ ID NO: 1049 - DNA, 4847 bp, Rattus norvegicus
cgccctcggggccgcaacgagcggccgagcttacagaatcggcccctccctctatcccttctggccgtagagcctgtccgaggcccggactcagaacgcggagaacgggttagggtagcggccgggcgtgaggggaccgcacagcatccttgttcccaggacgcgcggaccaagaggaagcgaggggtgtcgggtcctgttcgctgctggagctccaaggtgaccaaggatggcagagaggatatgaccggcggctgccgtcgtctgccctcctagtggcatcaccatgcagaagcccagtggcctgaagccccctggccgaggggggaagcactccagtcccgtgggtaggccctccatcgggtctgcctcatcttctgtggtggcatcggcgagcggctccaaagaagggtctcccctgcacaagcaggcgtcgggcccctcctcggctggagccaccactactgtctccgagaagccaggtccaaaggcagccgaagtgggtgatgacttcttgggagacttcgtggtgggcgagagggtgtgggtgaatggcgtgaagcccggcgtggtgcagtacctgggtgagacacagtttgcgccaggccagtgggccggcgtggtcttggatgatcctgtgggcaagaacgatggagctgtgggtgggctgcgctacttcgagtgcccagctctacagggcatcttcacacggccctccaagctgacccgccagcccgcagctgagggctccggcagtgacggccactcagtggaatccctcaccgcccagaacctgtccctgcattctggcacggccacgcccccactcaccggccgagtcatccccctgcgggagagtgttctcaacagctccgtgaagacgggcaatgagtctggctccaacctctcggacagtggttctgtgaagcgtggtgacaaggacctccacctgggagaccgtgtgctggttggtgggacgaagaccggtgtggtacgatatgttggggagacggactttgccaaaggcgagtggtgtggtgtggagctggacgagccccttgggaagaacgatggggcagtggcaggcaccaggtacttccagtgcccacccaagttcggtctctttgcaccaatccacaaggtcatccgaattggcttcccatctaccagtccagccaaggccaagaagaccaagcgcatggctatgggtgtctcagccttgacccacagccccagcagttcttccatcagctctgtcagctctgtggcctcctctgttggtggccggccgagccgtagtggcctgctcacagagacctcttcacgctatgcccggaagatctcaggcaccacagccctgcaggaggcactgaaggagaaacagcagcacatcgaacagctgctggctgagcgtgacttggagagggcagaagtagccaaggctaccagtcatatctgtgaggtggagaaggaaattgccctgctgaaggcacagcatgagcagtatgttgcagaagctgaggagaagctgcagcgggcacggttgctggtggaaaacgtgaggaaggagaaggtggatctgtccaatcagctggaggaggagaggaggaaggtggaggacctgcagttccgggtggaagaagagtccatcaccaaaggagacttggagacccagacccagctggagcacgcgcgcattggggagctggagcagagtctgctattggagaaggcgcaggccgagcggctgctcagagaattagcggataacaggctgaccacagtggctgagaagtctcgggtgctgcagttagaagaagagctgagcctgcggcgtggtgagatcgaagagctacaacactgcctcctccagtcaggtccaccacctgcggaccacccagaggccgctgagaccctgcggctgcgagagcggctgctgtcggctagcaaggagcaccagcgggacagcaccctgctccaggacaagtatgagcacatgctaaagacgtaccagacagaagtggacaagcttcgggcagccaacgagaagtacgctcaggaagtggcagacctcaaggccaaggtccagcaggccaccaccgagaacatggggctcatggacaactggaaatccaagctggactctctggcctccgatcaccagaaatctttagaagacctgaaggccacgctgaactctggcccaggcgcccagcagaaggagattggcgagctgaaggccctggtggagggcatcaaaatggagcaccaactggagttagggaacctgcaggccaagcatgacttagagacggccatgcatgggaaggagaaagagggcctgcggcagaagctgcaagaggcccaggaggagctggccgggctgcagcagcactggagggcacagctggaggagcaggcagcagcaccggctgagctacaagaagcccaggaccaatgtcgtgacgcccagctacgtgtgcaggagctggagggactggatgtggaataccgcggccaggctcaggccatcgagttcctcaaagaacagatctcgctggctgaaaagaagatgctggattacgagatgttgcagagggcggaagcccagagcaggcaggaggccgagcggctgcgggaaaagcttctggtggctgagaatagactgcaggctgtcgagtccctgtgctcagcccagcacagccatgtgatcgagtccaatgacctttctgaggagaagattcggatgaaggagactgtggagggcctgcaggacaagctgaacaagagggacaaagaggtggcagccttgacatcccagatggacatgctcagggcccaagtaagtgctctcgagaacaagtgcaaatcaggagagaagaagatagactctctcctgaaggagaagaggcggctggaggcagagctggaggccgtgtctcggaagacccatgatgcctctggccagctggtccacatcagccaagagttgctacggaaggagaggagtctgaatgagctgagggtgttgctgttagaagccaatcggcactccccagggcccgagagagacctgagccgtgaggtacacaaagctgaatggcggataaaggaacaaaaactgaaagatgacatccggggcctgcgtgaaaagctgaccgggctggacaaggagaagtccctgtcggagcagaaacgctactccctcattgacccagcttcagcgcccgagttgctgagactgcaacatcagttagtgagcacggagggatgcctgcgggacgcactggaccaggcccagcaggtggagaggctggtggaggccctgaggggctgctcagataggactcagaccatcagcaattccggttctgccaatggtatccaccagccagacaaggcccacaaacaggaggacaaacactgacccccaagggacaccatggaccggccctactcacaccagaagccctgccaggcttcccagcagcgccaccttcaggcaggagccagaactttccctttggagatgagactgtgtttgtaacgataattgtcctcactgccgtggacacatcccacctgaaccccctgccggaccaggaggctcccacagacacggccttccacagagcgcggtacagctgggcccagccctggaggacctctcttgtcccaaggagcttcttgaatttgcggaggctgaagcgatccagttgggcctctcttggctatagcaggctgccccgaggcttgtctgggcacccgggtacttccccatctccctttccttctggtgtcccccaggtcccctgcaggcccctgagaggtggagcagggctcctgcttggacgcgtaacacaccaagaagggcttcagtcttcagaaactagggaggggatgcttgacttcatatgctgatcctctaacacaatggtacaaggtcgcttgggcctctagccagggaagatttgggggtgacaggttccttattcctcgacaccacgctagtatgcgttacccacttcccctctgctgcccagaaagcattgagcagacagcttcagtattaggtgagctcgcaaacccactcttcttaccttgaccttgagctgggactggctcaggggcttacagccaagagcgggaagaaaactctttaaacaaagcattcacgcggtgttttgctgggtgagaggaatcacgctggttccctttatttccgggaacccctgccatgttactccaaagaccccagcaacccacagagggtcctgcttctatcttcccagggcgggaaccacagtgggtgacaggtatggtaagtccttaggattggcccaggtggcctctgtgagcaccattagacaccagcaggtgcggtcacgctcttgtccttagggagaagctgaattagcagccccacagcccaaccccctgcttcctgttggcttttgggtagcacttgccgttaacaacagcagcctagagcctagaattgacgctttagtggcccaactgcagagccagtatatcgctctttccagcacaatcgggcagctcacagattaggaattaacagccaaaggctcccacagtagggaccagacggggctgagccccaccctggagtgggcttgcacctggtaggtgtgcaagaagccatttccccataagcactggcctttgacggccccctcagcctacccggtgtggccacccagtggtggctcagccattccctcccctccccctcccctcagtggaattgtggaagtgtggcaagtccatgttcggacaataaagcttgtgattaaggtaaaaaaaaaaaaaaaaaaaaaaaaaaa

SEQ ID NO: 1050 - DNA, 2597 bp, Rattus norvegicus
cattctccaaagaagcagaaaaatggctatgagaagaaaagggttccagaagcaaccccactccttgatgccagttcactggagtatctgtttgcgcagggacagtatgatttgatcaaatgcctggctcccattcgggaccccaagacagagcaagatggacatgatattgagaatgagtgcctgggcatggctgtcctggccatctcacactatgccatgatgaagaagatgcagttgccagagcttcccaaagacatcagctacaagcgatatattccagaaacattgaataaatccatcagacagaggaatcttcttaccaggatgcgaataaataatgttttcaaggatttcttgaaggaatttaacaacaagaccatctgtgacagcagtgtgtctacacacgacctgaaggtgaagtacctggctaccttggaaaccttaaccaagcattatggagccgagatatttgagacttctatgctcctgatttcatcagaaaatgagccgagtcggtgccattccaacgacagtggcaatgttctctatgaagtcatggtaacaggaaatctcgggatccagtggcggcagaaaccaaatgttcttcctgttgaaaaggaaaaaaataaactgaagcggaaaaaactggactatattaaacacaagaaggaggatgccagaaacaaactccgggaagagtggaacagtttttcctatttccccgagattacccacattgttatcaaggagtctgtggtcagcattaacaaacaggacaacaagaacatggaactaaagctctcttctcatgagggagccttgtccttcgtgtccctggtagatggctacttccggctcactgcagatgctcaccattacctctgtactgatgtggctcccccgctgattgtccacaacatacagaatggctgtcacggtccaatctgcacagatattgcattcaataagctgcggcaggaggggagtgaggaggggatgtacgtgctgaggtggagctgcaccgactttgacaacattcttattgctgtcagctgcttcgaaaagtccgaggtattgggtaatcagaagcagttcaagaactttcagattgaggtgcagaagggccgctacagcctgcatggctctgttgaccactttcccagcctgagagacctcatgaaccacctcaagaagcagatcctgcgcacggacaatataagctttgtgctgaaacgctgctgtcagtctaagcctcgagaaatctccaacctactagtagccactaagaaagcccaggagtggcagcctgtctactctatgagccagctgagtttcgatcggatccttaagaaagatattatccaaggtgagcaccttggcagaggcacaagaacacatatctattctgggaccctgctggattacaaggacgatgaaggaattgctgaagaaaagaagataaaagtgattctcaaagtcctagaccctagccaccgggacatttcactggccttctttgaggcagccagcatgatgagacaggtttcccacaaacacatcgtgtacctctacggcgtctgtgtccgagatgtagaaaatatcatggtggaagagtttgtggagggggggccattggatctcttcatgcaccggaaaagtgatgcacttactaccccttggaagtttaaagttgccaaacagctggccagcgccctgagttacttggaagataaagacctcgttcatggaaatgtgtgcactaaaaacctcctcctggcccgtgagggcattgacagtgacattggcccgttcatcaagcttagtgaccttggcatcccagtctctgtgctgaccaggcaagagtgcatagagcgaaatccctggatcgctcctgagtgtgttgaagactccaagaacctgagtgtggctgctgacaagtggagctttggaaccacactctgggaaatccgctacgatggcgagatcccactcaaggacaagaccctcattgagaaagagaggttttatgaaagccgctgcaggccagtgacaccatcttgcaaggagctagctgacctcatgactcgctgcatgaactatgatcccaaccagagacctttcttccgagccatcatgagggacattaacaagctggaggagcagaatccagacattgtttcagaaaagcacccaataacagaggtggatcccactcattttgaaaagcgtttcctaaagaggattcgtgacttgggagagggtcactttgggaaggttgagctctgcagatatgatcctgagggagacaacacaggggaacaggtagctgtcaagtccctgaagcctgagagtggaggtaaccacatagctgatctgaagaaggagatagagatcttacggaacctctaccacgagaacattgtgaagtataaaggaatctgcatggaagacggggggaatggtatcaagctcatcatggagtttctgccttcgggaagcctaaaggaatatctgccaaagaataagaacaaaatcaacctcaaacagcagctaaaatatgccatccagatttgtaaggggatggactatctggg

SEQ ID NO: 1051 - DNA, 1524 bp, Rattus norvegicus
aagcttggtaccgagctcggatccactagtaacggccgccagtgtggtggaattccagcgcgactgtccctggagccgtcccgcgcctcagacccgcgagtccccgccgctccgcgcgcagtatggcgccccccaaggccctcgcgttcgggctcctgctcgcggtggtcacggcgacgctggccgcagctcagaaagactgtgtctgtaacaactacaagctgacgtcacggtgctatgagaatgagaatggtgaatgccagtgtacttcctatgggacacaaaatactgtcatttgctccaaactggcatccaagtgcttggtgatgaaggcggagatgactcacagcaagtctgggaggaggatgaaacccgagggggcgatccagaacaacgacggtctgtatgatcccgagtgtgacgagcaagggctcttcaaagccaagcagtgcaacggcaccgccacgtgctggtgcgtgaacaccgcgggtgtccggagaaccgacaaggacacggagatcacgtgctccgagagagtgaggacctactggatcatcattgagctcaaacacaaagaaagagcacagccttataacttcgagagtttgcatactgcacttcaggacacatttgcatctcgatacatgctgaatccgaaatttatcaaaagtattatgtatgagaataatgttatcactattgatttgatgcaaaactcttctcagaagactcaagatgatgtggacatagctgatgtggcttactattttgagaaagatgtaaagggggagtccttgttccattcatctaagagcatggacctgagggtgaacggggagctcctcgatctggaccccgggcagactctgatttactacgtcgatgaaaaggccccggagttttccatgcagggcctcacggctgggatcatcgccgtcattgtcgtggtggtgttagcagtcattgcggggattgttgtcctggttatatctacaaggaagagatcagcaaaatatgagaaggctgagataaaggagatgggtgagatacacagagagctcaatgcctaaccaaccatgccgtgtgctgcactgaggagggagccaccggacggaaatggcgaagaactcaggttgcaaacggatagacctggggaggatggagacctttcgagggtcactgctttgttagctaagctcacacatttgtaacagtgaaatttgtactcataaatacaagcagcttgacattggcattaacaatcttaaaattagacgagtgtcttacacatgcaggtctggcgtggaactcagaacttagcctgccaagataggagagcttatgcttattgttgaagtgtgtgtgtgtgtgtgtgtgtgtgtgtgtgtgtgtcataaacagcccacagtagaatacgatgactactctcatttttgtgattaaagctgcccttctacacactgagtcttgtacataataaacgtttttaatgaaataaaacatttttaaactgaaaaaaaaaaa

SEQ ID NO: 1052 - DNA, 1214 bp, Rattus norvegicus
aagtattaaaaagctggacacttctgtcattcggacatttttactcacaagttcccagaatgagggctgcgctggagacagcagacattgccatagtggccctgtattttgtcctggtcgtgtgcattggtttctttgccatgtggaaatctaatagaagcactgtgagtggatacttcctggccgggcgctctatgacctgggtggccattggtgcctctctgtttgtgagcaatattgggagtgaacacttcattgggctggtagggactggagctgcaagtggatttgcagtgggcgcatgggagttcaatgccttgctgctcttgcaacttctgggatgggttttcatccctatttacatccgctcaggggtgtacaccatgcctgaatatttgtccaagaggttcggtggccataggattcaggtctattttgcggccttgtccctgctcctctatatcttcaccaagctctcggtggatctgtactcaggggccctctttatccaggagtccttgggttggaacctttatgtgtctgtcatcctgctcattggcatgactgctctgctgaccgtcactggaggccttgttgcagtgatctacacagacactctccaggctctgctcatgatcattggggcactgacacttatggttattagcatgatgaaggttggagggtttgaggaagttaagagaaggtacatgttggcctcacccaatgttgcttccattttgttgacacacaacctttccaacacaaattcttgtatggtgcatcctaagcaagatgccctaaagatgttgagagatccaacagatgaagacgtcccatggcctggattcattcttgggcagaccccagcctcggtatggtactggtgtgctgaccaggtcatcgtgcagagggttctagcagccaaaaacattgctcatgccaaaggttctactctgatggctggcttcttgaagctcctaccaatgtttatcatagtcgtacccggaatgatttccaggatactgtttgttgatgatatagcttgcatcaacccagaacactgcatgcaagtgtgtggaagcagagctgggtgctccaatattgcttacccacgcctggtgatggagttggttcccgtgggccttcggggcctgatgatggcagtgatgattgcagctctgatgagcgacttggcctccatcttcaacagt

SEQ ID NO: 1053 - DNA, 1514 bp, Rattus norvegicus
tgaacccgcaggtttgcaccggaggctctcgcgggggcctcgctggccctgggcggggactcgcgggctgaggacgctcctgtgtccccagaatcctgcagaaggacagcgccatgtccacgttcaggcaggaggacgttgaggaccattatgagatgggagaggagcttggcagcggccagttcgccatcgtgcgcaagtgccagcagaagggcaccggcatggagtacgcggccaagttcataaagaagcggcgcctgccgtccagccggcgcggtgtgagccgtgaggagatcgagcgcgaggtgagcatcctgcgcgagatccgccaccccaacatcatcacgctgcacgatgtgttcgagaacaagacagatgtggtgctgatcttggagctggtgtccggcggcgaacttttcgactttctggctgagaaggagtcactgacagaggatgaggccacgcagttcctcaagcagatcctggacggtgtccactacctgcactccaagcgcatcgcgcactttgacctgaagccggagaacatcatgttgctggacaagcatgcagccagcccacgcattaagctcatcgactttggcatcgcgcacaggatcgaggccggtagcgagttcaagaacatctttggcacgccagagttcgtcgcccctgagattgtaaactatgaaccacttggcttggaagctgatatgtggagcatcggcgtcatcacctacatcctcctgagcggggcttccccattcctgggggagaccaagcaggaaacgctgacaaacatctcggctgtgaactatgactttgatgaagagtacttcagcagcaccagtgaactggccaaggacttcatccgaaggctgctggtcaaagatcccaagaggaggatgaccatcgcacagagcctggagcattcctggatcaaggttcgccggcgtgaggacggcgcccggaagccagagcgacgccgactgcgcgcggcgcgcctgcgcgagtacagtctcaagtcgcactcaagcatgccgcgaaacacgagctacgccagcttcgagcgcttctcgcgcgtgctggaggacgtggcggcggcggagcaggggctgcgcgagctgcagcggggccggcggcagtgccgggagcgcgtgtgcgcgctgcgcgtggctgcggaacagcgggaggcgcgctgccgcgacgggagcgccgggctaggccgcgacctgcgacgcctgcgcacggagctgggtcgcaccgaggctctgcgcacgcgcgcgcaggaggaggcacgggcagcgctcttgggcgctggtggcctgaaacgtcgcctgtgtcgccttgagaaccgctacgacgcgctagccgcacaggtggctgctgaggtgcagttcgtgcgcgatctggtacgcgcgctggagcaggagcggctgcaggccgagtgcggcgtgcgctaggctgcgacacccccagatctccggccatccccagaataaagctactttccacgc

SEQ ID NO: 1054 - DNA, 1247 bp, Rattus norvegicus
cttacttcatggagctatttgatccggcggagctgccggagctactcaagctttattaccgaagactctttccttacgcccagtactatcgttggctcaactatggcggagtgacaaagaattactttcaacaccgtgaattctcattcacactgaaagatgatatttacattcgctaccagtccttcaacaaccagagtgatctggaaaaggagatgcagaaaatgaatccatataagattgatataggtgcagtatattctcacagacccagccaacacaacacagtgaagctgggggctttccaggctcaggagaaagaactggtctttgacattgacatgacagactatgacgacgtaaggagatgctgcagttccgcagacatatgctccaagtgctggactctcatgacaatggccatgcgcatcatagatcgggcattgaaggaggactttggatttaagcaccgcctctgggtgtattcaggaaggagaggtgtacattgttgggtctgtgatgagtctgttcgaaagctgtcctctgctgttcgctccgggatcgtggagtacttgagtcttataaagggtggtcacgatgttaaaaagaaggttcacctaaatgagaaagttcacccttttgtcagaaaatctataaacataattaaaaagtactttgaagaatatgccttagttgaccaagatattcttgaaaataaagaaaactgggataagattttagcccttgttcctgagacagttcatgatgagctgcaaaaagggtttcagagatttcacagttcacctcagcgctgggaatacctgaggaaagtggccagtgcaccacagaataccaagaatgataagtgtggcccctggctagaatgggagattatgctccagtactgtttcccacgcctggatatcaacgtcagcaaaggagtcaaccatttactgaagagcccttttagtgttcaccctaagacaggtcgcatttctgtgcctatcgattttcagaaagtggatcagtttgatccatttgttgttccaactataagtgctatctgccgggaattggatgtggtttccaccaatgagaaggagaaggaggaaaatgaaactgacagcagacacagagtcagagattataaaaggaccagcctagcaccatacgtgaaagtatttgaacagtttctcgaaaacctggataaatctcggaaaggggcacttctcaagaagagcgattta

SEQ ID NO: 1055 - DNA, 990 bp, Rattus norvegicus
ccagcggccacggtccctggtctcccagctacggagttacccggcggagccggttcaagtccagcagccatgtccatgggcctggagatcaccggcacgtcgctggccgtgctgggctggctgtgcaccatcgtgtgctgcgcccttcccatgtggcgcgtttcggcattcatcggcagcagcatcatcacggcgcagatcacctgggaaggcctgtggatgaactgcgtggtgcagagcaccggccagatgcagtgcaagatgtacgactcgctgctggccctgccgcaggacctccaggccgcccgagctctcatcgtggtgtctatcctactggcagccttcgggctcctcgtggcgctcgtgggggcccagtgtaccaactgcgtacaagatgagacggccaaggccaagatcaccatcgtggcgggagtgcttttcctgttggcggctgtgctcaccttagtgccggtgtcctggtccgccaacaccatcatccgggatttttataacccgctggtacctgaggcccagaagcgagagatgggaactgggttgtacgtgggctgggctgccgccgcgctgcaattgctagggggcgccttgctgtgttgctcctgcccaccacgcgagaagtacgcacccaccaagatcctctattccgcgccgcgatccaccggccctggcaccggtaccggcaccgcctatgaccgtaaggactacgtctgagaggccgggtgcgcgcacaccgcaccatcaccactaccaaccgtcgatgtaccccacccgtccagcgtgcagcctcgcctcagagaccaccccaccttccagatggttacagacgccacgcagtctgcttgctaggctggaagaggacagacagcctggcgtccccttttctccggttgccacctgattacctggcctaggaactgtccaagtcgaatggacaaagacacctcgcccttcccaagtacagggttggggtgg

SEQ ID NO: 1056 - DNA, 754 bp, Rattus norvegicus
gctgatagcgagcactgctatcccacagtggcagatgagctcctatgcaggcgacaacatcatcacagcccaggccatgtacaaggggctctggatggagtgcgtcacgcagagtaccggcatgatgagctgcaaaatgtacgactcggtgcttgccctgccagcggccacgcaggccactcgagccttaatgattgtgtccttggtgttgggcttcttggccatgtttgtcgccacgatgggcatgaaatgcacacgctgtgggggagatgacaaagtgaagaaggcccgcatagctatgactggaggcattattttcatcgtggcaggtcttgctgctttggtagcatgctcctggattggtcatcagattgtcacagacttttataaccccttgacgcccatgaatattaagtacgagtttggtcctgccatctttatcggctgggcagggtctgctctggtccttctgggaggggccctgctctcttgctcctgccccggcagtgaaagcaaagctgcataccgtgcaccccgctcctaccctaagtccaactcctctaaggaatacgtgtgagctggggaccccagcctgtgggcaaggtgtgaggcaaaggcctcctggtcactccaccgccaaacaccatgtatagttccctgtgggaggggggggagggccgaggggggtgggtgggagaggaagacaaaacatggggagggtgtgcttttgtacagtaataaaattaagttttgg

SEQ ID NO: 1057 - DNA, 4128 bp, Rattus norvegicus
ggttccggctgtgggcagcagggtggtccgcgactgcggccggaagcaggctgagcggctctcggcgagcgccgcctgtacttccggggacttcagcctagctcttgagttttccctgtaggcggcgcgggagggaaaagtttgcagggccgtgctgggaagatcacctccgcttcccaatgtgagcagtttctcgaacgctctctctagaaggttgcccagagaggtggtggacgggaacatgaggcagcgtctcctcttcctgaccactttggtgcctttcgtcctggcaccccgacctccggaggaaccaggctctggctcccacctgcgacttgagaagcttgattctttgctctcagactacgatatcctctctttatctaatatccagcagcactccataaggaaaagggatctacagtctgcgacacacttagaaacactactaactttttcagctttgaaaaggcattttaaattatacttgacatcaagtacagaacgcttttcacagaacttgcgagtcgtggtggtggatgggaaagaggaaagcgagtacagtgtgaagtggcaggacttcttcagcggacatgtggttggtgagcctgactctagggttctagcgcacataggagatgatgatgtcacagtaagaatcaacacagatggggcagaatataacatagagccactttggaggtttgttaatgatactaaagataaaaggatgctggtgtataagtctgaagatatcaaggatttttcacgtttgcagtctccaaaagtatgtggttatttaaatgcagatagtgaagagttgcttccaaaagggctcatagacagagagccatctgaagagtttgtccgtcgagtgaagaggcgagctgaacctaacccattgaagaatacttgtaaattactggtggtggcagatcatcgattttataagtacatgggccgaggagaagagagcactactacaaattacttaatagagttaattgaccgagttgatgacatataccggaacacctcgtgggacaatgcaggatttaaaggttatggagtacagatagaacagattcgaattctcaagtctccacaagaggtaaaacctggtgaaagacacttcaatatggcaaaaagttttccaaatgaagaaaaggatgcttgggatgtgaagatgctgctggagcaatttagccttgatatagctgaagaggcctctaaagtctgcctggctcatcttttcacctaccaagattttgatatgggaactcttggattagcttacgttggttctcccagagcaaacagtcatggaggggtttgtccaaaagcttattacaacccaggtgtgaagaagaacatctatttgaatagtggtctgacaagtacaaaaaattatggtaaaaccatccttacaaaggaggctgacctggttacaactcatgaattgggacacaattttggagcagaacatgatcctgatgggctggcagagtgtgccccaaatgaggaccaaggaggaaagtatgttatgtaccccatagctgtgagtggtgaccatgagaataataagatgttttcaaactgcagtaaacagtccatctacaagaccatagaaagcaaggctcaagagtgcttccaggagcgcagcaacaaggtgtgcggcaactccagggtggacgaaggagaagagtgtgacccgggcatcatgtacctgaacaacgacacctgctgcaatagtgactgcacactgaagccaggtgtgcagtgcagtgataggaatagtccttgctgtaaaaattgtcagtttgagacggcccagaagaagtgccaggaggctatcaatgctacttgcaaaggagtgtcttactgcacagggaatagcagtgagtgccccccaccaggagatgctgaagatgacactgtgtgcttggacctgggcaagtgcaaggctgggaaatgcatccctttctgcaagagggagcaggagctggagtcctgcgcatgtgctgacaccgacaactcgtgcaaggtatgctgcaggaacctttctggcccatgtgtgccttacgtcgatgcagagcaaaagaacttatttttgaggaaagggaagccctgtacagtagggttttgtgacatgaatggcaaatgtgagaaacgggtacaggacgtaattgagcggttttgggatttcattgaccagctgagcatcaacacttttgggaagtttctggcagacaacatcgttgggtctgttctggttttctccttgatattttggattcctttcagcattcttgtccactgtgtggataagaaactggacaagcagtatgagtccctgtctctgtttcatcacagtaacattgagatgttgagcagcatggactcagcatctgttcgcattatcaagccgttccctgcaccccagactccaggtcgtctgcaggccctgcagccggctgcaatgatgccgccagtgtctgcggctccaaaactggatcaccagaggatggacaccatccaggaagaccccagcacagattcacatgtggatgatgatggctttgagaaggaccccttccccaacagcagtgcagccgccaagtcctttgaggacctcacagaccacccagtcaccaggagtgagaaggccgcctccttcaagctgcagcgtcagagccgagttgatagcaaagagacagagtgttagtgggagcctgggcctgctctgggggacacagacctacagatgttccacagagctgacctgaatcaaaatagactgtaatgatctgagaaacgggagcagcttagcagatgctggtcatgtgacaggaccttcacatgacatcctgtgtatgtaggccctttgaagaggtgaggtaaatctggcttatttaaggctttcaggttttggggttttcttttgtaatctaaaaatctcctttgacctgtggtgcagaagcagaaaataaggctggatcaagttcctggtgacagcactgattaagccttcagtctgtttttctgtatgctgtaaggtcctctcactacggtgaagcacttagcagtgaggataactggaacacagactttttgggggttttggccttcacatgtgcgttgtctccaaatgccgtctgtcttggcactgaactttgtggatacagtcctttccaagatgaagactagctctggaacagtctatacaaacagccacatgaacttcaagatggcctattaactgcttagccccaggttccctggacagtttttccgttttgcaaaaagtgtcttcacgggtctctaaacattgtttgtcttaaaaaatactgggctggagagttggccccacagttaagagcacttggtttcattcccagtacccacacggtggctcttaactccaatcccaggggagatgacatcttctgaactctagaacacaaggcatgcattggtgcagtcaaacatgcaggcaacacacacaaatttagaaagccaagtgctgtaagaagttgcacatcccccaacctacagtgcttcgcggtctgagctggagtggagctctctcctgaacactctggaaggctggcaggtgctgagctggctagggagacgggtggggcccagccctggaagaaccgtcttcagcctcagcaagcagacactcgcgttacctcaggctttggggcttcaggacccaggatgttttgtacttattgtgtgaggataaataccattagcctgaattctcatttctgtaagttttagttataaaagctttttttcttctaagaattgcaatgtgctcaccagcaaacacgtcttaaccagaataacttgtaactctgaggacagttaaccaaacctgtgccttgtctctcctgagggtgtctgttacactaatacttgaacatgtaccttgtggtattggctccttttactagtcatgacagccttatatgttagttacactttgaggatttgctctaaggtgagtggggtgtgtgggtgtatgtatgaatgaaacagttggcagaatataagaaaaccatttttataaaattgtgactttttaaaacaaaaaaaaaaaaaaaaaaaaaaaaaaaa

SEQ ID NO: 1058 - DNA, 1194 bp, Rattus norvegicus
agagagagagagagagagagagagagagagaacccacccacccggcgactaatctgatcccggctgtcccccgggaccagcgaggtcccagaagacccacgagggagcgggcgtaacgcgtggctgcgggtgggagccatggacgccttcatccgagtcgccaaccaaagccaaggtcgggaccgacttttcagagccactcaacacgcatgcatgttgcttagatatttgttagagtctaaggctggcaaagaggcggtggtaacgaagctcaagaatctggagactagtgtgagcactggccgtaaatggttcagactaggcaacgtgctccatgccatccaggccactgagcagagcatccaagccactgaccttgtgccccgcctatgcctaacattagccaacctgaaccgcgtggtttattacatctgtgacactgtcctctgggcgaagagtgtgggtctgacatctggaatcaacagagagaagtggcaaatgcgggcggcccgccactactactatttcctcttgctgagcctggtccgggatctgtatgaggtcttgctgcatatgggacaagttgcacgcgacagagcaaagagagagaagtcctccggggaccctcctaagtacagcgtcgctaatgaagaaagtgaatggctccagtccttcctcctcctcctcttccagtctctaaagcgaaatccgcccttattcctggacaccgtgaagaacttctgtgacatcctgatccctttgaaccagctcgggatctacaagtccaaccttggcgtggtaggatttggaggtctcgtgtcctctgtggctggcctcatcactgtggtgtatcctcagttgaaactgaaggcccgctagggtgtttggaaaatttaagactgacgttcagtggagcaaacatttgcttttgtcatgatgtctactgtacttaattttttttaatcatgtgagcatcttaccaaccggtgatgtgagcagaggtaggacccacaacggagcctgaagactgatgacgtttttgtaaacacggcagtaacttctgcacatttccccttcagtgacttctgactactgcaaaaacatttgtgccgtcattgaagacgtgtaaaggggaagtcagaacattgctgagcatcttttctgtacatagtaagagctcatatatctaacaaa

SEQ ID NO: 1059 - DNA, 1715 bp, Rattus norvegicus
gacaagcttttccggtctccatggctgccctggcggttctacacggcgtcgtccgcaggcctctgctccgcgggctgctgcaggaagtaagatgcctgggacgaagttatgcatccaaacccactttgaatgatgtggttatagtgagtgctacacgaactcccattggatccttcctgggcagccttgcctctcagccagccaccaagcttggtactattgcaattcagggagccattgaaaaggcagggattccaaaagaagaagtgaaggaggtctacatgggcaacgtcatccaagggggagaaggacaggccccgaccaggcaagctacactgggtgcaggtctacccattgccactccgtgcaccacagtaaacaaggtgtgtgcctcaggaatgaaagccatcatgatggcctctcaaagtcttatgtgtggacaccaggatgtgatggtggcaggcggaatggagaccatgtcaaatgtcccgtacgtaatgagcagaggagcaacaccatacggtggggtaaaacttgaagacctgattgtgaaagacgggctaaccgatgtctacaataaaattcatatgggcaattgtgctgagaacaccgcgaagaagctgagtatctcgcgggaggagcaggataagtacgccatcggctcttacacccgaagtaaagaggcgtgggatgcagggaagtttgcaaatgagattacgcccatcaccatctcagtgaaaggtaaaccagacgtggtggtgaaggaagatgaagagtacaagcgagttgacttcagtaaagtgccaaagctcaagacagtgttccagaaagaaaacggcacagtaacagctgctaacgccagcacactgaacgacggagcagctgctgtggttctcatgactgcagaggcagcccagcggctcaaggttaagccactggcacgaatcgcagcatttgctgatgctgctgtagaccccattgatttcccactcgcacctgcatatgctgtacctaaggttcttaaatatgcaggactgaaaaaagaagacattgccatgtgggaagtaaatgaagcattcagtgtggttgtactagccaacattaaaatgctggagattgaccctcaaaaagtaaatgtccatggaggagctgtttctctgggccatccaatcgggatgtctggagctcggattgttgttcacttggctcatgccttgaagcaaggagaattcggtctggctagtatttgcaatggaggaggaggggcttccgccgtgctgattgagaagctgtagacatcttgttttaggagacagttccacgtgacccgctgaagtgaactaccccttgggccagattatattcaggataagctatttcattttttattattttctactaaaaatttttaaaaatcacatccaaaaacccattgaaattgcaaataaaaatttctcctcctttaatattttgtaaacagtcggatactctactattgaaatatactgtaggtactagaggcatggctcagccgttaagagcacttgttgctacctgtgtggtgcatggctttaatcccagcacttggagacagaggcaagtgcatctttctgagttaaagttagcctggtccacagagctagtgccctgacagccaagactacacagagtagtagaaactctgggggaaaaaaaaaaaacaaataaaaaaaaaa

SEQ ID NO: 1060 - DNA, 1109 bp, Rattus norvegicus
gaattccctgctgcaaacatggcgctgctggcccgtgcgttctttgctggggtgtcccgcctcccctgcgatcccggtcctcagaagtttttcagctttggaacgaaaaccctgtatcaaagcatcgatgctccacagtctaaattcttcccacccattttaaagcctatgctaccacctaatgcctttcaaggaaaagtggctttcatcacgggaggaggcactggccttggcaaggcaatgacaactttccgctccagcctgggtgcccagtgtgtgatcgcgagcaggaatattgatgttctgaaagctactgcagaagagattacttctaaaactggaaataaggtctatgcgattcggtgtgacgttcgagatcctgatatggtacacaacacagtactggagctgatcaaagttgcagggcatcctgatgtggtgataaacaatgcggcagggaacttcatttctcccagtgagagactgtctcccaatggttggaggaccataactgacatagttctcaatggtacagcctatgtgacgatagaaattggaaagcagctaattaaagcacagaaaggagtcgcctttcttgctatcactacgatctatgctgagagcggatcaggctttgtaatgccaagttcttcagccaaatcaggcgtggaagccatgaataagtctcttgcagctgaatggggtagatacggaatgcgtttcaacataattcagccagggcctatcaaaaccaaaggtgcctttagccgtttggacccgactggaaaatttgagaaagatatgatcgagagaatcccctgtggtcggctgggaactgtggaggaacttgccaatctagcgactttcctttgcagtgattatgcctcttggatcaatggggcagtcattcgatttgacggtggagaggaagtgtttctgtcaggtgaattcaactctctaaagaaggtcaccaaggaggagtgggatgtaatcgaaggcctcatcagaaagacaaaaggctcctaagacgttcatggcttcctctgtgacaaactaaagtttagggactatatagatggacatttgagttaataaattttttgtctgat

SEQ ID NO: 1061 - DNA, 1034 bp, Rattus norvegicus
cagatgggtgcgagagatgccagtggaacgagtgagaagaaggactgtcctccagagagggggatgtgtccctgcctgggagcctaagcctgaatgcactaagggccaccccaaagacgcgccccagcccgccatgtcccggatccttcgggcatcctgcctcctgtccctgctcctggccgggtttgttccgccgggccggggacaagagaagtccaagacagactgccatggcggtatgagcggtaccatctacgagtatggagcccttaccatcgatggggaggaatacattccttttaagcagtatgctggcaaatacatcctctttgtcaacgtagccagctactgaggtctgacagaccaataccttgaactgaatgcactacaagaagaacttggcccattcggcctggtcattctgggcttcccttgcaaccaatttggcaaacaggagccaggcgagaactcggagatcctgcctagtctcaagtacgttcgaccgggtgggggctttgtgcctaatttccagctctttgagaaaggagacgtgaacggggagaaagagcagaagttctacactttcctgaagaactcctgccctcccactgcggaactcctgggctcacctggccgcctcttttgggaacccatgaagatccatgacatccgctggaactttgagaagttcctggtggggccagatggcataccaattatgcgctggtaccaccggaccacagtcagcaacgtgaagatggacatcctgtcctatatgaggcggcaggcagccctgggggccagagggaagtaactgatgccctaccccaccccaccccatcccctgcccatcatgcaagggctggggaggggctcttcaggaaggaagcaaaaaacggaatcattctacacatacatcccagattcccttccttattacataaaagacaagcttggcacactgtgtgcctgtaccactgtgcacatcgtggcaactgtcccactgtgtgccatgcactgcctgcctggaaccc

SEQ ID NO: 1062 - DNA, 1083 bp, Rattus norvegicus
acacaactctcaatcatccagtgaactgggctgactgtggcaggacctgggcggtgaggaaacccttggggacaccgatgtggcttgagcctgctcctcttcttggcgctggcctctcccgtcgcgttctgctgcaggccggatcccgcctcgccgcaggggggcctggacgagcccgtcgcttctctaacaaggcggtgttggtggagaaggagggcgaggcaggaatcgcagtgatgaagttcaagaaccctccagtgaattcctcagcttggagtttccgacagagttttcgtcatcagcctgagaagctggaaaatgaaaagagcatccgaggtgtcatcctcacttcggagcgcccgggaacctccccgccgccccacgacatgaagaagaaggacgaccagcccactatgctgagtactggaaggctcgtgccaggagctgtggctgaggctctacttgtccaacctgacttgatatctgccatcaatggcgcctttccagctggaggctgcctcatggctctcacctgtgactacaggataatggcggacaactccaagtataccataggattgaatgagagcctgctgggcattgttgcccccttctggttaaaagacaactacgtgaacacatcgggcaccgagcagccgagcgtgcccttcaactggggacgttttcccactaacatgacagcagctgctctactgacgcttcacagaagcctcaatgaggtggtacctgaggatcaggtacacagcaaggctcgctcagtgatggccaagtggtttaccattccggaccattctcggttgctgacgaagagcatgatgcgcaaggccacggcggacaacctgatcaagcagcgagaggctgacatccagaacttcaccagtttcacctccagagactccatccagaagtccctgcacgtgtacttggaaaagctcaagcaaaagaagggctgacctaagggtgccacacggtgtttagttacacgtgccttctagggacccatggtcccaaggattatcaataaggtatttttcaatttaaaaaaaaaaaaaaaggaattcc

SEQ ID NO: 1063 - DNA, 2602 bp, Rattus norvegicus
ctgctgcctgcactttgccctggtcctccaatggcttcaacccgtgccaggcccatgctgcctctgctcctggtcctggtcgccgttgtgatccccgggcctgtcggtgctcaggtatccatccatcccacagaagccttcctgcctcggggtggatccgtgcaggtgaactgctcttcctcttgcgaagacgagaacctcggcctggggttggagactaactggatgaaagacgaactatcgagtggacacaactggaagctcttcaagctgagcgacattggggaagacagcagaccactgtgctttgagaactgtggcaccacgcagtcctcggcttctgccaccatcactgtgtattcgttcccagagcgagtggagctggatcctctgcccgcctggcagcaggtgggcaagaacctcatcctgcgctgcctggtggaaggcggagcaccgcggacacagctctcagtagtgctgctccgtgggaatgagacactgagccgccaggcagtggatggggaccccaaggagatcacattcacggtgctggccagcagaggcgaccacggagccaatttctcatgcttcacagaactggacctcaggccacaagggctgtcactgttcaagaatgtctccgaggtcaggcagctccggactttcgatcttccgactagggtcctgaagctcgacacccctgacctcctggaggtgggcacccagcagaagttcttgtgttccctggaaggcctgtttcctgcctctgaagctcagatatacctggagatgggaggccagatgctgaccctggagagcacaaacagcagagattttgtgtcagccactgcctcagtggaggtgactgagaagttggacagaaccctgcagctgcgctgtgttttggagctggcggaccagaccctggagatggagaagaccttgagaatctacaacttttcagctcccatcctgaccctgagccagccggaggtctcagaaggggaccaagtaactgtgaagtgtgaagcccacggtggggcacaggtggtgcttctgaacagtacttcccccaggccacccacctcacagggtacttcccccaggccacccacctcacagatccaattcacactgaatgccagcccggaggatcacaaacgacgcttcttttgctctgcggccttggaggtggatgggaagtccctgtttaaaaaccagaccttggaactccatgtgctatatggtcctcacctggacaagaaggactgcttggggaactggacctggcaagaggggtctcagcagactcttacatgccagccccaggggaatccagcccctaatctgacctgcagccggaaagcagatggtgtcccgctgcctatcgggatggtgaagtctgtcaaacgggagatgaatggtacctacaagtgccgtgcctttagctcccgtgggagtatcaccagggacgtgcacctgacagtgctgtaccatgatcagaatacctgggtcataattgttggtgtgttggtactgatcattgcgggcttcgtgatcgtggcgtccatttacacctattaccgccagaggaagatcaggatatacaagttacagaaggctcaggaggaggccctaaaactcaaggtacaagccccgcctccctgagcccactggacaggacacctgcctgggccccgctgctcttgaacagatcaatggacagcatttacccctcacccacctcctctggctgtcacaggacaggacagtggcctggggatgcatacttgtagcctcaggcctaagaggactcggaggggcaagactgtgaactcgtgacctggacacacctacagcctggtgggcctgcagccaagaaaggctgacttccttctctattacccctgctgaggggccccctaccttaggaaggtgtgatatccggtagacacaagcaagagaagaaaaggaacaccatgcttcctctgacatgggaaagctgggacactgtccccaactcttgttgatgtatttattaattcagagttctgacagttatttattgagtaccctgtacagacactagaggagtgagcaggttaacatgtaagttattgcctagaccctggtgaaggggcacaacagagtctggggaaagatcatacgggtttgggcttctccacaggtcagggtgctttcctcaaaagagctgatttctttcacgagtcatataaatactatgtggacgagcagtggccctctgctcgtagacctctctgggacccctgcctcctcccacagcctggagtctcccagcaccagcatgggtgaccacctccccacctacatacattcctacctttgttcccaatgtcaaccaccatgcctaaatatggacgctcacctttagcagctcaacaatggagtctcatgcccgtgaaattatggtcaatccctgcatgcctccacccggctccacctcaaagagaatgcctgggagaaaatgttccaaccacttagaagggtcctgcaagctgttgtgggagggtaggcacccctcccagcgcagaagcctttcctttgaatcaataaagtttta

SEQ ID NO: 1064 - DNA, 1292 bp, Rattus norvegicus
tcctagtgttacaggacatggagaaggaacgggagacactgcaggtctggaagcaacgtgtgggacaagagctcgattctgtgatcgctttctggatggagcattcccatgaccaggaacacgggggcttcttcacatgccttggccgcgatgggcaggtatatgatcacctcaaatatgtctggctgcaggggaggcaggtatggatgtattgtcgcttataccgcacttttgagcgcttccgccgtgtcgagcttctggatgcagcaaaagcaggtggtgaatttttgttgagttatgcccgggtggcaccgcctggcaagaaatgtgcttttgtgctgacccaggacggccgtccagtgaaggtgcagcggaccattttcagcgagtgcttttacaccatggccatgaatgaactgtggaaagtaacaggggaaatgcattatcagagagaagccgtagagatgatggatcagatcatccactgggtaagggaggacccagctgggctgggccggcctcagctctcgggaacactggccacagagcccatggcagtgcccatgatgctgctcaacctggtggagcagcttggagaagaagatgaggagatgaccgacaagtatgcagaactaggggactggtgtgcccataggattcttcagcatgtccagagggatggacaagttgtactggagaatgtatcagaggatggcaaagagctccctggttgccttggaagacatcagaacccaggccacacactggaagctggctggtttctgctccagtatgccctcaggaaaggtgatcccaaacttcaaaggcacattattgacaagtttctcttactgcctttccactctggatgggaccctgagcacggaggcctcttctacttccaggatgctgatgatctctgccctacccagctggaatggaacatgaagctgtggtggccacacactgaagccatgattgccttcctcatgggttacagggacagcggggacccagccttgctgaacctcttctaccaagtggctgaatacaccttccaccagtttcgtgatcctgagtacggggaatggtttggctacctgaaccaagagggaaaggtggcccttaccatcaaaggaggtccttttaaaggctgcttccatgtgccgcggtgcctggccatgtgcgagcagattttgggagccctactccaacgccttgggcccgcccccctcggctccttgcccgctgtccccactcgcgaaggctcgaaataaagctgaccctgttcc

SEQ ID NO: 1065 - DNA, 2540 bp, Rattus norvegicus
ccgcggcccactacagcagtcgcccgccgtcagcctcccgcgctcgtctctcgtcactgctgctcggcgtccattgctgcctctccccgcagtcgccgacgtcgcttccccgcgcgctcccacaaccgccgccccgccggtcagtgaagccggtgagccattccccgcgccggcccccagaggcgggcatccagccggaccccgagtgtggccctctcctgctgtggccgtccgcgccttctcgaccgcttatccagcatgaaaaccaagttctgcaccgggggcgaggccgagccgtccccgcttgggctgctgctgagctgcggtggcagcgctgccccgacgcccggcgtagggcagcagcgcgatgccgcaggcgagctggagtccaagcagcttggtggccggtcccaacctctcgcgctgccgccgccaccaccgccgcccctgccgctgcccccgccgccatcaccgccgctagcggacgaacaacccgagccccggacgcggcgcagggcctacctgtggtgcaaggaattcctgcccggagcctggaggggccttcgcgaggaccagttccacatcagtgtcatcaggggtggtctcagtaacatgctgttccagtgttccttgccagactccatagccagtgttggtgatgaacctcggaaagtgctcttgcgactgtatggggcaatcttaaagatgggggctgaagcaatggttctggagagtgttatgtttgccattcttgcagagaggtcacttgggccaaaactctatggcatctttccgcaaggccgactggagcagtttatcccgagccggcgattggacactgaagaattatgtttaccagatatttctgcagaaatagctgaaaaaatggccacatttcatggtatgaaaatgccattcaataaggaaccaaaatggctttttggaacaatggaaaaatacctgaatcaagtactaagacttaaattcagcagggaggccagagttcaacaactgcacaagttcctctcttacaatctgcctctcgagcttgagaacctgaggtcattgctgcagtatactagatccccagttgtgttttgtcataatgactgtcaagaaggtaatatcttattgttggaaggccaagagaattctgaaaagcagaagttgatgctcattgactttgaatacagcagttacaattacaggggatttgacattggaaatcatttctgtgaatggatgtatgattatacctatgaaaagtatcctttcttcagagcaaacattcagaagtatcctacccgaaaacaacagctccattttatttcaagttacttgactacattccaaaatgattttgaaagcctcagcagtgaagagcagtctgctacaaaagaagacatgttgcttgaagtcaacagatttgcccttgcctctcatttcctctggggactttggtccattgtacaggccaagatctcatccattgaatttgggtacatggaatatgcccaagccaggttcgatgcctactttgaccagaagaggaagcttggtgtgtgaatggatggctccactcttcaccactggactgcaggaggtggctgcaccaggccctcagtggagcgctgctgtgaccactgccctgggcagaaggcctggacgtctcactactgagcaccgatgtgtatgatactacagactatattaaagtggagtaacatttctttcatctttgtttacactctcactaggactctgaaccatgattggaagcagaaatatagtgtgatagtgcaatagctcagaccccgcctaagcgggaggcctttcagctacatggctacagcttcagccacttaggccccagccagacagagcagtgctgtgtgggtactgagtgctgacttaggatattaatgtgctgcaacacgttcatgaccaggctttgaaggtgacagtctgacaatgtgttggagacactctgaagggcaagtgaacagacatactgtgaaatggctcgacaggaggagcctgaattgtggggtctgtggaggcagccagctgtttctgtacagggtacacttgactatgggtatgcatctgcaggcagtagctgcagccctcctgtgcctgtgtacacatgactacaggggccagtgtcactgactggccataactgcagtgtctcctaactgggtgtgctttatgcttcagcttcccggggaggagcagtggagccagcttcctcaccccttcttgccttctctctgcctgacctggaacttgggctttcgcccattgccctctgaagctgcttcccatctgatgtcactgggagacagcagctgtatgtgtggggtattggggtgcaggtagattagagctgtgaaatccatgtacattaatacccaatgggataaacctagaatttttttttttttactctgaactctgaattgttttgtgcacatatttctgctaccaccgaaactgtattatacagataaataaacaacttgaaacttaaaaaaaaa

SEQ ID NO: 1066 - DNA, 2130 bp, Rattus norvegicus
gcagccggcgcctactgccactcccgcgagcatgaaggaccgaacccaggagctccgcacggccaaggacagcgatgacgacgatgatgtcactgtcactgtggaccgagaccgcttcatggatgagttctttgaacaggtggaagagatccggggctttattgacaagattgctgaaaacgtggaggaggtgaagaggaaacacagcgccatcctggcctccccgaaccccgatgagaagaccaaggaggaactggaggagctcatgtcggacattaagaagacagcgaacaaagttcgctccaagctaaagagcatcgagcagagcatcgagcaggaggaaggtctgaaccgctcgtcggcggacctgaggatccggaagacgcagcattccacgctgtcccgaaagtttgtggaggtcatgtccgagtacaacgccactcagtcagactaccgagaacgctgcaaagggcgcatccagaggcagctggagatcactggccggaccacgaccagtgaggagttggaagacatgctggagagtgggaatcccgccatctttgcctctgggatcatcatggactccagcatctcgaagcaggccctcagtgagatcgagaccaggcacagtgagatcatcaagttggagaacagcatccgggagctacacgatatgttcatggacatggccatgctggtggagagccagggggagatgattgacaggatcgagtacaatgtggaacacgctgtggactacgtggagagggccgtgtctgacaccaagaaggccgtcaagtaccagagcaaggcacgcaggaagaagatcatgatcatcatttgctgtgtgattctgggcatcatcatcgcctccaccatcgggggcatctttggatagaaaccaccccacccacggctccattctggatgggtctccctgaggaggcccctggctgctgcacctagctgggttgccctccccactcctgccttctggctgggagtccttttccctcccatccaacaccgctccctctctgccatgaggctcccgtccccaccaccctgccccaagccgtgtcgtgtgcatgatcttgtgacagtgtgtgtctgtacaggaggcagaggggagcaggatcgggaacagccagaggggctgggtacaggccagtgtgggcaagactcgggccctggccaggtccgccttccttcaggcctggggcctacgcttccctgggactcaggctcctttctggaccccaaccttgccctcactcgccctgccctctggcttcctcagctctccccaccatgccaaggcacctggagggtggggaccagctggtcacatggtgctgcttttcaggttaggggtggggacagctcagcactgagtctttgttagctgcccactgccaggatgctcagggtgccacggctgctggtgtgctaggagcacccagtacccctctttggcaaagcctgacagtgtctctggcctcagctgcccttaccacagccctgggagtcctgttcctgggctgggcctgagcctagtgatcctttgctaagaagctcagtggtgccatctccagccttgctctgagctggagaggtggagcaggccatagtcctctgcccacagtctctaacgggcatgttaagtcgtggccggagttgcatgttagggacagcggttccctgctccctttctgctctgaaaagccaggtgtcactttgggcctgcagtctcaccctgccctgtctcccattgatgtgccacgtggtgtcaggtgtactggatgcagtattcagcagccagctggggagggggctccccactttcctcccctgccaacttggggcttctcagagtcaaaaatgtacccccatgccccaggacccctttctcatccacaggcaaggagtatgcatgcgactgcatgcagcgggagctggggccgtgtctgtgtgccccttcccctccgctttgctcctgcccagtgactgaccactgtccgtgctgccttctctcatggccacttccctttaccccgtcaccaaaggtctcggtacaaccagctgcccattttgtgagatttttatgtagaataaacatttgtatctgga

SEQ ID NO: 1067 - DNA, 1356 bp, Rattus norvegicus
atgaatatcgatcaattatccgactttttgctggaagtgtccaagtctggagcagcggtgccgaataaattgccggataaacgagaggaaaatcatctgaagaagaaattcttgaataaagttgctccaaattccttatttgccgccaattacatcgcttcaaactacacagatgtggatctaattcaatcgataattggtcaaattctatcgatttattataaagaaggagtgctcaggctctatgctctgcaatttgtgccgggatttgtgtcactttacctattggctctgtcaaaaaagcagcataagagcatttctttgttcgaaaccttccttattgcgatttataatgaagaaattgtggatggctcggaatctaacgagaaaaagatggaagacatcagaatcccctcaatccgccatcatagcgtctaccacgatccggcgaaaattcaagtacaaaccgatgttcctgtaatgagaaatgcaagtattacaccggttttgaacacgctccgctttggtccatttccgtcggtatccaagatgaacggagaaaataaattcatgattatcaatagaattttattttctgtaaacgagtcacttttcgaagttgcaagcgaagttgcggcgagatatgtctgtttgggaacgctttcagtctgccgttctggcttcacattcccggagactgcattccgtagccgtgtgctcgacactgaatctcacgagattatcgaagatttttcaaaaaaaccacgtcagcaagtgtccggagagtttttgaatcatttgctacgtggatgctatttggcacttttcaatggagccgccgatttggctctgcaggcaattgatgctattcatttgagagcacaatatgaaatgcttcccgatacgcttttggtcgttaactccctccgtaactcacttttggacaacatgtggagcaaggagaaacgaggggaactcatgtggacacggccacagcataaggaccaaacaaagcgccgcgacatggttacgaacgcctcactgaaaatgaaacgaatgcctgaagatattccagttttggaacgtcaaaaagaatccacgtcgtcacgattcaacgagcttatggaggagggaatcgatcatttgcatgatttgaagaaaaaagtggaaaaagtgaagggaggactgcatcagaagatgcatagacgacgaaaaagtgtggaacccgaggaaaatgagctgcagactattaaagtacggcggggttttggatggaaattttggggaaaaatcggaggaggaaaacgggaaaaaaagtgccaaaaaccgtttgaaaatgcacacaaaaacacttaa

SEQ ID NO: 1068 - DNA, 760 bp, Rattus norvegicus
gcggccgccttagctgttcgtggagccgtctctgcaccggcctttgggccggaggcgctcactccagactgggaaaaccgagaagtctccacagggaccacgatcatggctgtgcaatttgacgggggcgtggttctaggagcagactccagaacaaccactgggtcgtacatcgccaatcgagtgactgacaagctgacccctatccacgatcacatcttctgctgccgctcaggctcggcagctgatacccaagcagtagctgatgctgtcacgtaccagcttggtttccacagtattgagctgaacgagcctccactagtgcacacagccgccagtctctttaaggagatgtgttaccgctacagagaagatctgatggcaggaatcatcatcgcaggctgggaccctcaagaaggagggcaggtgtactctgttcccatgggaggtatgatggtaagacagtcctttgccatcggaggctccgggagctcatatatctatggctatgttgatgctacctatcgggaaggcatgaccaaggatgaatgtctgcaattcactgccaatgctcttgctttggctatggaacgggatggctccagtggaggagtgatccgcttggcagccattcaacagtcgggggtagagcggcaggtgcttttgggagaccagatccccaaggtcaccatctccactttgccacctccctgaagcctaggattcccatcccgacgcacaagctaataaacagattgtc

SEQ ID NO: 1069 - DNA, 932 bp, Rattus norvegicus
gtgtgtgtgcgctacggggtgwagactgtgtctgaaatagcgggaacgccatgtcccgtggttccagcgccggttttgaccggcacattactattttctctcccgagggccgactctaccaagtagaatatgcttttaaggctattaaccagggtggacttacatctgtagctgtcagaggaaaggactgcgcagttattgtcacacagaagaaagtacctgacaaactactggattccagcaccgtgactcacttattcaagataacggaaaacattggctgtgtgatgacaggaatgacagctgacagcagatcccaggtacagagggcacgctatgaagcagctaactggaaatacaaatatggctatgagattcctgtggacatgctgtgtaaaagaattgctgatatttctcaagtctacacacagaatgctgaaatgaggccacttggttgttgtatgattttaattggtatagatgaagagcaaggccctcaagtgtacaagtgtgatcctgcaggctactactgtggctttaaagccaccgcagcaggagtgaagcagacagagtcaaccagcttcctcgaaaaaaaagtgaagaagaaatttgattggacatttgaacagacagtggaaactgcaatcacatgcctgtctactgttctgtcgattgatttcaaaccttcagaaatcgaagttggagtagttacagttgaaaatcctaaattcaggattcttacagaagcagagattgacgctcaccttgtggctctagcagagagagactgaacactcttatcagcttaccagatccatgatgccatgtgcctatgtgtttagtaacaacaaaccgacatcttagaggccctggattgaagatggaaactctcccactcctcctgccactgactggttaggactctgtataaa

SEQ ID NO: 1070 - DNA, 970 bp, Rattus norvegicus
gcggtgtggttgagtagggtgctgctttcagtcgtgtggcctttggaactccgcgtagcactgccgcctcctcctgtcctcgccatgttcctcactcggtccgagtacgacaggggtgtgaacactttttctcctgaaggaagattatttcaagtggaatatgccattgagggccataagcttggttctacggccattggcatccagacatcagagggtgtatgtctagctgtggagaagagaattacctcgccactaatggagcctagcagcattgagaaaatcgtagagattgatgctcatataggttgtgccatgagtgggctaattgctgatgctaaaactttaattgataaagccagagtggagacacagaaccactggttcacctataatgagacaatgacagttgagagtgttacccaggctgtgtccaatctggctttgcagttcggagaagaagatgcagatccaggtgctatgtctcgtccctttggagtagcattgttgtttggaggagttgatgagaaagggccccaactgtttcacatggacccatctgggaccttcgtacagtgtgatgctcgagcaattggttctgcgtcagagggtgcccagagctccttgcaggaagtttaccacaagtctacgactctgaaggaggccatcaagtcttcactcatcatcctcaagcaagtcatggaggagaagctgaacgcaactaacatcgagctggccacagtgcagcctggtcagaatttccacatgttcacaaaggaagaactggaggaggtgatcaaggacatttaaggaggggccatcctcgaacttctgtgggacagtttcagttctaatggctcttagactttatttccaactccacgtcgtgaaaatatccagtatatgtatgtgtgtttttttatgatgtctgtacataacagcaattctgaaataaaaaaaatttacaaat

SEQ ID NO: 1071 - DNA, 880 bp, Rattus norvegicus
gatctccgcactgctaggatgctgcaagccggagcacctaccgccggctctttccggacgggagaagtccacaccgggacaaccatcatggctgtggaatttgacgggggtgtcgtggtgggctctgattcccgagtgtcagcgggagcagccgtagtgaaccgcgtgtttgacaagctctcccctctgcaccagcgcatctactgtgccctctcgggttccgctgctgatgcccaagccatagccgacatggccgcctaccagctggagctgcacgggttggaactggaggagccgccccttgttctggctgctgcaaacatagtgaagaacatctcctacaagtaccgcgaggacttgttagcgcatctcatggtagctggttgggaccaacatgaggggggccaggtgtatggaaccatgggagggatgctaattcgacagccctttgcgatcggcggttccggaagcacctatatttacggttatgtggacgcagcttataaaccaggcatgacccccgaggagtgccggcgtttcaccacagacgccatcactctggccatgaaccgagatggctccagtgggggtgtcatctacctggtcaccattacagctgatggtgtggaccatcgcgtcatcctgggagacgagctgccaaaattctacgatgagtgaagtcccttctttgtttgcaataaactttatggagccagaggttggtgtaatgggcagaggtgaaatgggtatcagagaaacggagtgcgtggagggaagcttcctcccggccgagagatcagcaagcacctcccattcttttttaaaaaataaactttattattaaaataaaaaactcttataaataaaaaataagtaaaac

SEQ ID NO: 1072 - DNA, 1124 bp, Rattus norvegicus
gaattctggccactttgtcttctccacagcctgtgctcattgccaaggggacaatgacggcctccagtgtcctcctgcacactggacagaagatgcctctgattggtctggggacatggaagagtgagcctggtcaggtgaaagcagctattaaatatgcccttagcgtaggctaccgccacattgactgtgcttctgtatatggcaatgaaactgagattggagaggccctgaaggagagtgtgggagcaggcaaggcagtacctcgagaggagctgtttgtgacctccaagctgtggaatactaagcaccaccctgaggatgtagaacctgctgtccggaagacgctggctgatctgcagctggagtatttggacctctatttgatgcattggccttatgccttcgagcggggagacaatccctttcccaagaatgccgatggaactgtcaaatatgactccactcactataaggagacctggaaggctctggaggcactggtggcaaaggggctggtgaaagccttgggcttgtccaacttcagcagtcggcagatagatgatgtcctcagtgtggcctcggtgcgcccagctgtcttgcaggtggaatgccatccatacctggctcaaaatgagctcattgcccactgtcaagcacgaggcttggaggtgacagcttacagccccttgggttcatcggatcgtgcttggcgccaccctgatgagccagtcctgcttgaggaaccagttgtcttggcactagctgaaaaacatggccgatctccagctcagatcttgctcagatggcaggttcagcggaaagtaatctgcatccccaaaagcatcactccttcccgcatccttcagaacattcaggtatttgatttcacctttagtccagaggagatgaagcaattagatgctctgaacaaaaattggcggtatattgtgcccatgattacggtggatgggaagagagtccccagagatgctggacaccctctgtatccctttaatgacccatactgaggcccgtagtttctcagcttccctttcagttctcctgctaagcattgcctgctactcccaagaaagaaggactcaataaagccattgaagtgt

SEQ ID NO: 1073 - DNA, 2721 bp, Rattus norvegicus
gcggccgtcggcggacgcgggaagaagtgtcttgtaggcgcggcgccccactcagccccggcccccctcatccgcgtactcggctgatgcctcagggcgtcagctcggcggagaggcggtcgaggcgtgcgcctggctagcagttggctttccccgtgactcggacacgtttgcagtcgaataaacttgcgaccgccacgtgtggcatctctccaaggaaccggctcaggaggagggcgcgcccatcgtgggatcgcgcggggcgcccggcagggcggcggcgacagcggcagagccggccgcggctgctgcgtgcggaggcgctgccggttacgtaaagatgaggggctgaggtcgcctcggcgctcccgcgagtcgcaagctcccgcgcccccgccccctcggccgcgccgcaccgcgctcgtcgtccgagaccagggcagggctagccgaagctccgcagccaccctcaagtttggccgcaccgcccgggctgccgtcgcccgcaccatgtccgcggccgcctacatggacttcgtggctgcccagtgtctggtttccatctccaaccgcgccgctgtgccggagcacgggggcgctccggacgccgagcgactgcgactacctgagcgcgaggtgaccaaggaacacggtgacccgggggacacctggaaggattattgcacactggtcaccatcgccaagagcttgttggacctgaacaaataccgacccatccagaccccctcggtgtgcagcgacagtctggagagtcccgatgaggatataggatccgacagcgacgtgaccaccgaatctgggtcgagtccttcccacagcccggaggagagacaggattctggcagcgcgcccagcccgctctccctcctccactctggagtggcttcgaaggggaaacacgcctccgaaaagaggcacaagtgcccctacagtggctgtgggaaagtctatggaaaatcctcccatcttaaagcccattacagagtgcatacaggtgaacggcccttcccctgcacgtggccagactgccttaaaaagttctcgcgctcggacgagctgacccgccactaccggacccacactggcgagaagcagttccgctgtccgctgtgtgagaagagattcatgaggagtgaccacctcaccaagcatgcccggcgccacaccgacttccaccccagcatgatcaagagatcaaaaaaggctcttgccagccccttgtgaggtgctccccatatggcaaccaggcagagatggtcccggaaggacagagctcccaggaaacagacggacacatggaaatctgccaccgcagagttgtgctggccacaggaggtcactgctctttggtcaatattctgacactctccctgcgctgtttccaaaaagcacacggtagcctaagatcaaagtcaacatttggtccccttgcagaggccactctgaaccgtctctgactgttggagggcaggcaaataaatgcttttggtattttctcctttgttttggggggtggggggagggggcaaggccaagacttggggtaggatttttgaagattcaggctggtgtacatacgtctgactgggtgagttgacccctggcctcccacagtgactctggatccttgatgcttgctgactctcagaattgtttttcttctctctcaatgtcacgaccagagtgcttcagcttgtttagcagagccactctcgaatcacgttaacttttgagatttaaaaaacaaaacaaaacaacaaaaaaaaaaaaaaacccctccatagcacagctgtcttttatgcaagcaagagcacacctactccagcatgatctgtcatctaaggacttcaaaacaaaacaaaacaaaaaaaaaagttacttatagtcagtggataagcagagtccgaatttacactaaacaagacagaccttcgaggggtcataagtccggaactttcaaaccttgcttcgtatgaatcgtactatctgaacataaactgcacttttattttctaataccgagggtgaatacggtaaatccatgccttgagggtagaagccgacattctgtttggcacacgttattatctgcttattttccaggatacacatttccctgagaacccacggcagagatgtgagggcagaatgtatggaaacacatgctgaggaggggaaggaggaggggagtgctttaaagatacaaaaaaaaaaaaaaaaaaaaaaagagcaaacaattttaacttcatgaatttgtttgaattttcccaagcttcagataacaacgccactcacgggactaggacgctgcaagagcattgggctctgtgtagcattagctgataaatgggtgtatagccatcaccagacctggaaatgcccccttttggtgggggtgggggtgtttcttggtctctctttcgttcctatgaaatttccactaagaggtgcaagagttatatcaaaggaaagggaactgaaatatggaaaaaaaaaagtttgcccctgtaagtagtctctagggaaggaagatgccacaatggtttcagaggcgactctgcagaacagtcccttctgctgaacataggtcagagaaacactcgtgaatggcatcacatcgccaactgtctgcatcatggcccaccactacttagcttgtatctcggtgtctacacaatggcctgaaccactggtcaccat

SEQ ID NO: 1074 - DNA, 1015 bp, Rattus norvegicus
cgctacacctcgctctctcctgggccggcggatccttttgtctctccaagcggtgaaggtcgcagagtcggcgcggcggttgcgggcgcactgacgcccgttctattggttatctccccagcctcagccaccgccgaacttgagctcgagaagccagcggatcgcgtccagttccggagccggggcatggtctagcagctcagtcaagcctgtgcatcatctgatccccagcagttctggtcccccttggcctctacttggctctaggtttagtctccactgccagctgccatgggcaagcagaacagcaaactgcggcctgaggtgctgcaggacctgcgggaacacacagagttcactgaccatgagctgcaggagtggtataagggcttcctcaaggactgtcccaccggccacttgacagtggacgaattcaagaagatctacgccaacttcttcccctatggcgacgcctctaagtttgccgaacacgtcttccgcacctttgacaccaacagcgatggcaccatcgacttccgggagttcatcatcgcactgagcgtgacctctcggggcaagctggagcagaagctcaagtgggccttcagcatgtacgacctggacggcaacggctacatcagccgcagtgaaatgctggagattgtgcaggccatctacaagatggtgtcctccgtgatgaagatgcccgaggatgagtccacacccgagaagcgaacagacaagatcttcaggcagatggacacaaacaatgatggcaaactgtccctggaagaattcatcaaaggtgccaagagcgacccgtccattgtccggttgctgcagtgtgaccccagcagtgctagccagttctgaggggaacgggcttttggacagttgtgagaaacacaggcttgacctgccatcttcagctttgcttgcaaaagtggattcctccgtgatctctcctgctctcccaggacctgggccaggcagcacatcacacccacccgacctg

SEQ ID NO: 1075 - DNA, 2842 bp, Rattus norvegicus
tcgcggaaggtgacgtggacacggaagtggtcgtcgtcgcggcggcaccggtgggagcggggccctgcacttggagtgcggcgggcaagcggacgggtggcggaggcctctcagcggcggcggcggcgacttaaggcgcaggcgtggtccgttgggtgcgaatccgctgagcccacgagcggcctcttagccctctctcctgcccgtcggaaaccgggagcagggacccgcttagccggcgtcatcatgaccaagaccggtagcaagggcgggaacctccgcgacaagctggacggcaatgagctggacctgagtctcagcgacctgaatgaggtccccgtcaaggagctggctgcacttccaaaggccaccgtgttggatctgtcctgcaataaactgagcactcttccgtcggatttctgtggcctcacgcacctggtaaagctggacctcagcaagaacaagctgcagcagctgcccgcagactttggtcgcctggttaaccttcagcatttggatctcctcaacaacaggctggtcaccctgcctgtcagctttgctcagctcaagaatctgaagtggctggatctgaaggacaatcccttggatcctgtcctggccaaggtggcaggtgattgcttggatgagaagcaatgtaagcagtgtgcaaacaaggtgttacagcacatgaaggccgtgcaggcagatcaggaacgagagcggcagcgccggctggaagtggagcgagaggcagagaagaagcgtgaggccaagcagcaagctaaggaagcaaaggagcgcgagctgaggaagcgggagaaggcggaggagaaggagcgtcggcgaaaggagtatgatgctcagaaagcttccaagcgggagcaagagaagaagcctaagaaggaaacaaatcaggccccaaaatcgaagtctggctctcgccctcgcaagccaccaccccgaaaacacaatcgctcctgggctgtgctgaaggggttgttgctgctgctgctgctatgtgtagcaggagggctggttgtatgccgggtgacagggctgcaacagcagcccctctgcaccagcgtgaacgccatctacgacaatgccgtccagggcctgcgccatcatgagatcctccagtgggtcctccagaccgactcccagcagtgagctcatcctcagcaccgctgcctcccagcctcggagcttggattcctatggaattgggttctgctggacacaacttctttttagcgtcagacctacctgccatcatcaaatggctgctgagtggtacttgagatctcccctttgtaggacttctctgttccttagtcagggttccctggtggaatgaggagaaatggagaggggggaggaagagttacctgcatgcctaaaggaataggcttaggggtggggagagagaaggcataggcttttctagttatgcaaagctgtgtaaggcaaggttcctttctactaaatggtcagctgtcactacatttatacttttgtatgtcacaaaccctttctttcattcctccctgggtaaccaggacggattggagggcagtgtgttactgggactaggggactaggaatacttgggtaaattcagcctaagctgggagggtaaagtaatacatttccttaaagatctcagacagtcaagcattttagcaatgtccaaaatgtctggctatgaacacatgttcactgccattggtccagtgtaacactttgaggcaggaggtgccgtccatgacttacttgcctacagtgttcaagctagtccaaggcacaacccagctttcactccagttttcttcctttcctttatgtcatttggcctcctttataatactcaaggggatgaactcacaccagagttgtcttagctaaagtgaatctttcataatagacggtcttaccacccacaaatagatctcatcagggtcctgggaaactaatcctgtggaattttgcctcagcttaaatggcttccacaaaatggcagcaggctgggctccttgcctcccttttagagcattaaactccctgatggcctggaagcacaggggcagatctctgcagcggcactgtgactgccctactagcacttggtatgatgaaatacctcaaaggcaacctagaaacttgatctcacagaagcaggtgcagagttgcttctggacctgtaacagaagggaaggaatagaacagtgggagccaaagggaaacaaagtcacacggtggcgctgcaagtgatacataagtaaacattagcacaaaccagggcagcagcacccacctccctgctgctaccagaaagcattctccccgcttccctgtctcttcacaacagctgcaggaagggatcggaaacctgtctcggtgcttatttgctaaaactcccaactgcaagctctccctagaggagcaggacctgtcggagttcagacagtgtagccccagtggcccatgtgcttaggtcagccactcaagactgtcctgacacgggaagaaaggcctttgtttttccctcccccagatagttctgccgtgtaggtccacaccttactcagaatcactacacattcctttagtcttcctccaagctccagagccatcggtacaaatgctttattgagacaaaatacatactacatatggtgacatcatgaaaacagaagtcagcctcatagatccctggctggttgaggcagctcagtggctgggcgtagtcaagccaacccgcaggcaagagttcactctgacttcgagatttgatgcttattctttggatttctacaattattaaatccgtgtctgagtggtc

SEQ ID NO: 1076 - DNA, 2169 bp, Rattus norvegicus
tgaggaggtgagccagctgcaggctacccttgcagagcaacgatggagaaagaggatcaagagaagacagggaagctgaccctggtccttgccctggcaactttcctagctgcctttggctcctccttccagtatgggtacaacgtggctgctgtcaactcgccctcagagttcatgcagcagttctacaatgacacctactacgacagaaacaaggagaacattgagtccttcaccctgacgctgctgtggtccctgactgtctccatgttcccctttggaggttttataggatctctcatggttggattcttggtgaataacttgggcagaaaaggggccttactgttcaacaacatattctccatcctgccggccatcttgatggggtgcagcaaaattgccaaatcctttgagataataattgcttccagacttctggttggaatatgtgcaggtatatcttccaacgtggtccccatgtacttaggggagctagcccccaaaaacctgcgaggggctcttggagtggttcctcagctcttcatcactgtgggcatccttgtggcccagctgtttggccttcggagtgtcttggcaagcgaggaaggctggccaatcctcctgggtctgactggagtccctgccggcctgcagctcctcttgctgcccttctttcctgagagcccccgctacctgctgattcagaagaaaaatgaatcagctgctgagaaagcccttcagacccttcgaggttggaaagatgtggacatggagatggaggaaatccggaaggaggatgaggctgagaaggcggcaggcttcatctctgtgtggaagctgttccgcatgcagtccctccgctggcaactcatctccacgatcgtcctcatgaccggccagcagctgtcaggagtgaacgcgatttactactacgctgaccagatctacctcagcgcaggggtgaaaagcaacgacgtccaatatgtgacggctgggactggggccgtcaacgtgttcatgaccatggtcacggtttttgtggtagagctttggggacgtcggaatcttctcctcatcggcttctccacctgcctcacagcttgcatagtgctgacggtcgcactggcactgcagaacaccatctcctggatgccctatgtcagcatcgtctgtgtcattgtctacgtcataggacacgccgtggggcccagtcccatccctgccctgttcatcaccgagatcttcctgcaatcctctcgaccatccgcctacatgatcggaggcagcgtccactggctctctaacttcatcgtgggcctcatcttcccgttcattcaagtgggccttggtccttacagcttcatcatctttgcgattatatgtctcctcacctccatctacatcttcatggtcgtcccagagaccaagggcaggacgtttgtcgagatcaaccagatttttgccaagaagaacaaggtatcggacgtatatccggagaaggaggaaaaggagcttaatgacctcccacctgctacccgggagcagtagcagagccaggccaccaggcagtatggccagtctgcatgggcctcctgtctagactttggttctgggttcttagtgtctgtgacactgggagggacacgagcctggcggggaatggcagccctccactcagtggggacacctgacgggctttcgtgcttccgtgctgtccctaaccatagaggccagtcacgggctcttggtcacacacaaagccatacctggcctttgctgggttgactgtggcgagggtcttgtaacattgcttttctaacaaaaacagttgccgagagacaagacgtgacggtcctattttttttttaactttttttttctattcttttttttttttttttttcggagctggggattgaacccagggccttgcgcttgctaggcaagcgctctaccactgagccaaatcccttgtgtggctcctcccatgggcgtggagagaccactggcatctgctggtgattgatgtggtcctctttttctgacccagccatgtcacaaagctgaggaacaggccacttggggagacacacggagcgtgaattatcaactgtcaacgacagtattctgtttagccaataaaacagatctgatcacttcttaaaa

SEQ ID NO: 1077 - DNA, 1464 bp, Rattus norvegicus
gacaagcttttccggtctccatggctgccctggcggttctacacggcgtcgtccgcaggcctctgctccgcgggctgctgcaggaagtaagatgcctgggacgaagttatgcatccaaacccactttgaatgatgtggttatagtgagtgctacacgaactcccattggatccttcctgggcagccttgcctctcagccagccaccaagcttggtactattgcaattcagggagccattgaaaaggcagggattccaaaagaagaagtgaaggaggtctacatgggcaacgtcatccaagggggagaaggacaggccccgaccaggcaagctacactgggtgcaggtctacccattgccactccgtgcaccacagtaaacaaggtgtgtgcctcaggaatgaaagccatcatgatggcctctcaaagtcttatgtgtggacaccaggatgtgatggtggcaggcggaatggagagcatgtcaaatgtcccgtacgtaatgagcagaggagcaacaccatacggtggggtaaaacttgaagacctgattgtgaaagacgggctaaccgatgtctacaataaaattcatatgggcaattgtgctgagaacaccgcgaagaagctgagtatctcgcgggaggagcaggataagtacgccatcggctcttacacccgaagtaaagaggcgtgggatgcagggaagtttgcaaatgagattacgcccatcaccatctcagtgaaaggtaaaccagacgtggtggtgaaggaagatgaagagtacaagcgagttgacttcagtaaagtgccaaagctcaagacagtgttccagaaagaaaacggcacagtaacagctgctaacgccagcacactgaacgacggagcagctgctgtggttctcatgactgcagaggcagcccagcggctcaaggttaagccactggcacgaatcgcagcatttgctgatgctgctgtagaccccattgatttcccactcgcacctgcatatgctgtacctaaggttcttaaatatgcaggactgaaaaaagaagacattgccatgtgggaagtaaatgaagcattcagtgtggttgtactagccaacattaaaatgctggagattgaccctcaaaaagtaaatgtccatggaggagctgtttctctgggccatccaatcgggatgtctggagctcggattgttgttcacttggctcatgccttgaagcaaggagaattcggtctggctagtatttgcaatggaggaggaggggcttccgccgtgctgattgagaagctgtagacatcttgttttaggagacagttccacgtgacccgctgaagtgaactaccccttgggccagattatattcaggataagctatttcattttttattattttctactaaaaatttttaaaaatcacatccaaaaacccattgaaattgcaaataaaaatttctcctccttt

SEQ ID NO: 1078 - DNA, 2424 bp, Rattus norvegicus
ggctgactgacagcctttttttttttttttttaatatttaattggagatagggtctataacccaggctaccttgagctactttatgcagcttgggatgacctagaacttctgatcttcctacttcaatctcccgaaagctgaggttactggcatacacaccatgcttcgttagtagtctgtgttggcctagaacctgcgacaagccttttgcctcagctcccagagtactggaatgatcagcatacaaaaccatacctgatttagcacgtgacctaccttctgcccactattttgagacagggtctcactatctagtactggttggcccataactcactatgcaaactaagctgtcttagaactggcagatccgtctgtctctgcctcccaagggttgaaattgttttgaaacaggttcatctgcaacctagacctggaactcccagcaatcttcctgcctcggcctcccaaatgctgctgggatgacaggcctctcatgtcttcaccccagtacagaccttatgtgcttgcccctcagtacagctagtgctgattccctgaaaaatcacctcttcctgctactagtagctcaaccagagatagtcccgcccataggcgtgattgatgagtcacacccacctctcccaattggttctactcttccaggaggcggggacaaggcaggggcagcagacgccatccggaccagaaaaagccaggagagaccagaaggtgcctggtccctgagagtctggtccactaactccagggactgtgggacagaggaacaaacaagaaagaactcgaggcctcgctgagtggcgcgcttgctgagtgctgccacatcccgcaagctgagcaggtatcccaactctgttcctgcccggtagaccacccgaggtggtgagtgtggtcttgtcttccagattcgtaggacagaagctccaggaggaggacccgcccaacatggcatcggagagcgggaagctatggggtggccgatttgcaggctcggtcgaccccaccatggacaagttcaactcatctatcgcctatgaccggcatctgtggaatgtggacctgcagggaagcaaggcctacagcaggggcctggagaaggcagggcttctcaccaaagctgagatgcagcagatactgcaaggcctggacaaggtggctgaagagtgggcccaaggcatcttcaaattgtaccctaatgatgaagacatccacacggccaacgagcggcgcctgaaggaactcattggtgaagctgcagggaagttacacacaggcagaagtcgcaatgaccaggtggtcacggacctcaggctgtggatgaggcaaacctgctcaaaactctccaccttcctcaaggtgctcattgaagccatggtagaccgggcagaggcggagtgtgaagtcctcttccctgggtacacacacttgcagagagctcagcccatccgctggagccactggatcctgagtcacgccgttgcgctgacacgagatttagagagactgaaggaggtgcagaagcggatcaatgtcctgccactgggcagtggggccattgcaggcaaccctctgggtgtggaccgggagttcctctgtgcagaactgaactttggagccattacgctcaacagtatggatgccaccagcgagagagacttcgtggctgagttcctgttttgggcttctctgtgcatgacccatctcagcaggatggcagaagacctgattctctacggtaccaaggaattcaactttgtgcagctctccgatgcctacagcaccggaagcagcttgatgccccagaagaaaaacccagacagcttggagctgatccggagcaaggcgggccgagtgtttggacggtgcgcaggactcctgatgaccctcaagggacttccaagcacctacaacaaggacttacaggaagacaaggaggctgtgtttgaagtgtctgacaccatgacagctgtcctccaagtagccactggagtcatctctacactgcagattcatcgtgagaacatggcacaggcactcagccctgacatgctggctaccgaccttgcctactacctggtccgcaaagggatgccattccgccaggcccacgaggcctcagggaaagctgtggtcgtggcagagatgaaaggggtggctctcaaccagctgtcacttcaggagctgcagaccgtcagtcccctgttctcgagtgacgtgaatctcgtgtgggactacagccacagcgtggagcagtacacagccttgggtggcacagcacagtccagtgttgagtggcagatcagccaggtgcgggccctgctgcagatgtagcagccctagattccacccagtcaaacgtgcgccccaataaagtggagccctggagaggccgccataaaccc

SEQ ID NO: 1079 - DNA, 3751 bp, Rattus norvegicus
agaaagagagctacagactccgcgcgctccggaagaccgggtcgtagagctcgagacaactcccgccagcagcaagacacgggagacccaaccaggatgacaaccctccccaggccgcccgctccatggaacaccagctcctgtgctgcgaagtggagaccatccgccgcgcgtaccctgacaccaatctcctcaaccgaccgggtctgcgagccatgcttaagactgaggagacctgcgcgccctccgtttcttacttcaagtgcgtgcagagggagattgtgccatccatgcggaaaatcgtggccacctggatgctagaggtctgcgaggagcagaagtgcgaagaggaggtcttcccgctggccatgaactacctggaccgtttcttgtctctggagcccctgaagaagagccgcctgcagcttctgggggccacctgcatgttcgtggcctctaagatgaaggagaccattcccctgactgccgagaagttgtgcatctacactgacaactctatccgccccgaggagttgctgcaaatggaactgcttctggtgaacaagctcaaatggaacctggccgccatgactccccacgatttcatcgaacacttcctctccaaaatgccagaggcggatgagaacaagcagatcatccgcaaacatgcacagacctttgtggccctctgtgccacagatgtgaagttcatttccaacccaccctccatggtggctgctgggagtgtggtggccgcgatgcagggcctgaacctgggcagccccaacaacttcctctcctgctaccgcacaacgcactttctttccagagtcatcaagtgtgacccggactgcctccgtgcctgccaggaacagattgaagcccttctggagtcaagcctgcgccaggcccagcagaacatcgatcccaaggccaccgaggaggaaggggaagtggaggaagaagctggtctggcttgcacacccaccgacgtccgagatgtggacatctgagggcccaccgggcaggcgggagtcaccaagtagtggcatccgcgaagagaaaggagccagcccgggtgctcctgacgaggtcccccttggggatgtgttgttaccagaaggggaagttttgttctctttgttggttgtttttccttaatctttctcctttctatctgatttaagcaaaagagaaaaaaatacctgaaagctgtcttaaagagagagagagagatagaattcgcatcaccctgagtatagggagacgggggggtgcctacaaaaatagaattctgtaccccagtaatcaactagttttctattaatgtgcttgtctgttctaagaataggattaacacacaggaagtcttgagaaggatttttgattcttttatgtgtttaagaaaaaaaagcttaagaaacattgctttaaaaaaagaaggaaaaaaaatacagcaaaccattgttaaagtagaagggttttaggtagagaaatgtactctgctttggtgaaaaggcacagatttgggaaggtcctcaacctcactcccctgcttgttcagtgcctacagacctgttacctgatgatacctgtgctttatcccaggagtggggcagacctcttaaccttactgatggtcgattcgacctctagcgggctcgtgggtgtggcaacctccagggctcatgttatgggccctctgccccccacaacctgcaggttcacagagcgccagccagcacgcaggggtagggatgaaatagtgacataatatattctatttttggggaaccttcctgttttgggggttcctgtttagagagatgctggtttttggctggtggccctgcagcccactcaacatcaggttgaacccacagcttttcttttgtgtgtggtttgttttgttatgtttttccttctccatgttcccaaaaccattccatttcaaagcacttttggtcagctagctggaggcagtgttgctgggtgtgtgtgtgtgtgtgtgtgtgtgtgtgtgtgtgtgtgtgtgtcggtgggggagggggtctagtggaatggttggggatgtccacacactcaattctgatggctgcacagcaggtgtgtagggctggtagcatgaggtgcttgggaagttgtgttgggtcgagaagagaaagctctgttctcgtaccaccgggatcttcctgcaaagtcggagggatcttttggtgccagctggcgtttggaagtagggaccgtgatggcattacctggacaaggggattcaggacgactcttaagtctttcacacaggaggcttttaaacactaaaatctctaatttatacgtaaggctacagaagagtatttattgggaaggttgcccatgacccgtgtgactcaaagcaatgtgatcttcccttgattcaaacgcacaccttcttccctgctggcgaaggttttaggccattgtctgagagactggtcttttattggccaagtggggtgtcctccaaaaaaaccaaaccacaaagacggagatgtgggtctccttgactttcccaacccaattgcccccattggagagccatccaaacctgaggaaaattaggggaccccaaaagagtcttgagtctggcacattcttgccgccgctcccaagttagcaacagtaggtaatttgcacacctctggctctgtgcctttctgttcaggatgtgttggtgggaggtggagagcgggtggctggagaggggatgtgagagaagaagtatggagggtagggaccacacgggacagaccgcggctcctttcacagcgctgctaccaatgactcccaggatccccggcgttcggaaccagattcacgttgctttgtatctttcatgttgttttcgctgctattggagggtcagttttattttgttgttgttggtttgtttgtttttttttacaatgtcataaactgccatgttcaagttttaatttcctcgtagaagagtgtatttacagatgccctctccgggactttttctatttattgtgattcaattttggattaatgtgattaccgctgtattcccaacaaaaggtgttttccacacacacacacacacacacacacacacacacacacacacacaggttcctgtacacaatacctcatgtatcacctaacaatacataggcctgccaggcgggtggggcggtctgcctccagggaccctgggaccctgctggggatcatcctgtcatgctgggccttcatttgatctgggacatagcatcacagcagtcaggccaactgtgttctgttagttatcaatattgttacttgtagcggcctgttgtgcatgccaccatgctgctggacccggagagatttgttctgagtctctggtgcatcatataatctgttaggttctagtgttctgtcttgttttgtgttactcacagcattgtgctaatgtaaagccagccgcaatgctgtaggccccaggttccctagcaagctgccaaaccaaaagggtcaccaccagcttagctgaggcgtcccaaccaggcaggacccttgagggctgctgtgtccatggtgatggggtgaagttttggccaaagggccaaaggctggtggatccacacagtctgccctgtgacatgaatggctttgaggggctctggctggtggtcaggttggctttgtgtattctggttgacacaccatggcgcttcccagcacagacatgtgaccagcatggtccagg

SEQ ID NO: 1080 - DNA, 3563 bp, Rattus norvegicus
tctagatccaacaatggaaaatctacatctacaatctcacttggaagagagtcaagaagccccttccttttgcgcacagaagaacaaattacaacaatcacacgatcagaacagaatccatcagtagatgctgccccagtgggacgacagaggaaagaaaagagactgacagacaccaggaaggaacaaggcagagctaggcccaaccaacagggagagcatgaaccctgggaaacagacattcggagtgaggatctcccaagaatcctgtctccgtgccttcattaaatcagggttcaccataggaatgctgtggccagctaggaacaaaagcatatcggcagagatgggaggaagtgggaggaagtgggaggctagagggacgtaaataaaaaaccaacagaaagaacaaaaacatacatttagggagaaactggaaggggaccgacggggacagtggcgaggtaggtgatggacggaggcacggtgtcctggtgtgggaggaattggcgccgttcgacaccaggcgggtccgttctgcagcagcactcagctatctccagcagcagccgccgcccgggccgaccagcagccgccgccacaggccgagggagccagcagtcagcggtgaacccgggccctcaccatgagttcttcgcctgttaatgtcaagaagctgaaggtgtcggagctgaaggaggagctcaagaagcggcgcctctcagacaagggcctcaaggccgatctcatggatcgactccaggccgcgctggacaacgaggcaggaggccgccccgccatggagcccgggaacggcagcctcgacctgggtggcgatgcggccgggcgctcgggagcaggcctagagcaggaggccgcggccggcgccgaagacgatgaggaggaggagggcatttccgctctggacggcgaccagatggagctgggcgaggagaacggggcggcgggggcggctgacgcgggcgcgatggaggaggaggaggcggcgtcggaagacgagaacggcgacgaccagggcttccaggagggggaggacgagctcggcgacgaagaggagggcgcgggcgacgagaacggccacggggagcagcagtcccaaccgccggcggcggcgcagcaggcttctcagcagcgcgggcctggcaaggaggccgcggggaaaagcagcggccccacctcgctcttcgcggtgacggtggcgccgccaggggcgaggcagggccaacagcaggcgggaggagacggcaaaacagaacagaaagctggagataaaaagagaggtgttaaaagaccccgggaagatcatggccgaggatattttgagtacattgaagaaaacaagtacagcagagccaagtctcctcagccacctgttgaagaagaagacgaacacttcgatgacacagtggtttgtcttgatacttataattgtgatctgcattttaaaatatcaagagaccgtctcagtgcttcttcccttactatggagagtttcgcttttctttgggctggaggaagagcttcttatggtgtgtcaaaaggcaaagtctgctttgagatgaaggtaacagagaagattccagtaagacatttatatacaaaagatattgatatacatgaagttcggattggctggtcactaaccacaagtggaatgttgcttggtgaagaagaattttcttatgggtattctctgaaaggaataaaaacctgcaactgtgagacagaagattatggagagaagtttgatgaaaatgatgtgattacgtgctttgctaactttgagactgatgaagttgaactctcttacgcaaagaatggacaagatcttggtgttgcctttaagattagtaaggaagttcttgctgaccggccattattcccccatgttctctgccataactgtgcagttgagtttaattttggtcaaaaggaaaagccatactttccaatacctgaagactgtacttttatccaaaatgtcccattagaggaccgagtcagaggaccaaaaggacctgaagagaagaaggattgtgaagttgtgatgatgattggcttgccaggagctggaaaaactacctgggttactaaacatgcagctgaaaaccctgggaaatataacattcttggaacaaacactattatggacaaaatgatggtggcaggctttaagaagcaaatggcagatactggaaaactgaacacactgttgcagagagccccacagtgtcttggcaagtttattgagattgctgcccgaaagaagcgaaattttattctggatcagacaaatgtgtctgctgctgcccagaggagaaaaatgtgcctgtttgcaggcttccaacgaaaagccgtggtcgtttgcccaaaagacgaagactataagcagaggacacagaagaaagcggaagtagaggggaaagacctaccagagcatgctgtcctcaagatgaaaggaaacttcacccttccagaggttgcagagtgttttgatgaaataacctatgttgaacttcagaaggaggaagcccagaagcttttggagcaatataaagaagaaagcaaaaaggcactgcccccagaaaaaaagcaaaacactggctcaaagaaaagcaataaaaataagagtggcaagaaccagttcaacagaggtggtggccatagaggacgtggaggattcaatatgcgtggtggcaatttcagagggggagctcctgggaatcgtggtggatataataggagaggcaacatgccccagagaggtggtggcggcggaagtggtggaattggctatccatacccgcgtggccctgtctttcctggccgaggtggttactcaaacagaggaaattacaacagaggtggaatgcccaacagagggaactataaccagaacttcagaggacgaggaaataatcgtggctacaaaaatcaatctcagggctacaaccagtggcagcagggtcaattctggggtcagaagccatggagtcagcattatcaccaaggatattattgaatacccaaataaaacgaactgatacatatttctccaaaaccttcacaagaagtcgactgttttctttagtaggctaactttttaaacattccacaagaggaagtgcctgcgggttccttttttagaagctttgtgggttgatttttttttcttttcttttttgtacatttttaattgcagttttaaagtgaatcgtaagagaacctcagcattgtgcacgataagagaatgtgtcagtatttcagggttctacattttatctgtaaaatgtgactttttttttatcacaacaaaagtaaaatgttgctttgtacctggtgtcttttattaagcatttactctcccatttctcacagagaataacagtcgggagtcattgtcacaatgaaatagcaatgtcagcaaccagattcatggaaggactgagggtcctcatgaatggcattaagattctgtactgctcataatacactccatcctctctagatggccgggcaatagtggaggggtaatctctgac

SEQ ID NO: 1081 - DNA, 1024 bp, Rattus norvegicus
gggggctgcagcggcggcggcagtagcggcagcggcggcggcggcggcggcagcgctccaactcgctccacgctccggctccgccgtcgagccgggagagagagagcctttgctgagcggccaggcactcggccggacgacaccagacacccgggccccttggaggcaccgcgctcacccagggccggcacagcgacccaaagccgaactccaagatgggaagcaagctgagcaagaagaagaagggctacaatgtgaacgacgagaaggccaaggacaaagacaagaaggctgaaggcgcgggcaccgaggaggaggggacccagaaggagagcgaaccccaggcggccgccgacgccaccgaggtcaaggagagcgcggaggagaagcccaaggacgcggcggacggcgaggccaaggcggaggaaaaggaggccgacaaggcggcggccaaggaggaggcgcccaaggccgagcccgagaagagcgagggcgccgcggaggagcagcccgagcccgcgccggcgcccgagcaggaggcggccgcgcccgggcccgctgcgggcggcgaggcccccaaggccggcgaggcgagcgcggagagcacgggcgcggccgacggcgcgccccaggaggagggcgaggccaaaaagactgaggctcccgccgccggccccgaagcgaaaagcgacgcggccccggcggcttcagactctaaacctagcacggagcccgcgccctcgtccaaggagacgcccgcggcctccgaggcgcccagttccgccgccaaggcccccgcgcccgccgcgcctgccgccgagccccaggccgaggcacccgtcgccagctccgagcaaagcgtggccgtcaaagagtaaccgggacagcctagccagaaccgacgccactcgcaaacgacctgtctcacgctctctctgtctctcactctgtcctctctctgtctctctatcctatactaacttgtttcaaattggaagtgaggatatgtattgcccaagggatt

SEQ ID NO: 1082 - DNA, 1183 bp, Rattus norvegicus
aacccgcagctgagccagaggctccggccctgtgcgcctaccgtggccccgccactatggccggcgtgtgggcgccggagcactcggttgaagcgcacagcaaccagtcaagtgctgccgacggctgcggctctgtgtccgtggccttccccatcaccatgatggtcactggcttcgtgggcaacgcgctggccatgttgcttgtggtgcgcagctatagacgccgggagagcaaacgcaaaaagtctttcctgctgtgcattggctggctggcgctcaccgacttggtggggcagctcctgaccagtccggtggtcatcctcgtgtacctgtcgcagcgacgctgggagcaactcgacccatcggggcgcctgtgcaccttcttcgggctgaccatgacagtgttcggactgtcctcgctcttggtggccagcgccatggccgtggagcgcgccctggctatccgtgcgccgcactggtatgccagccacatgaagactcgcgccacgccggtactgctgggtgtgtggctgtctgtgctcgccttcgcgctgctgcctgtgctgggcgtgggccgctacagcgtgcagtggcccggcacgtggtgcttcatcagcaccgggccggcgggcaacgagacggactctgcgcgggagccgggcagcgtggcctttgcctccgccttcgcctgtctaggcttgctggctctggtggtgacctttgcctgcaacctggcgaccatcaaagccctggtgtcccgctgccgggccaaagccgccgcctcgcagtccagcgcccagtggggccggatcaccacggagacggctatccagcttatggggatcatgtgtgtactgtccgtctgctggtcgccgctattgataatgatgctgaaaatgatcttcaatcagatgtcagtagagcaatgcaagacgcagatgggaaaggagaaggagtgcaattccttcctaatcgccgttcgcctggcttcgctgaaccagatcttggatccctgggtttatctgctgctaagaaagatccttcttcgaaagttctgccaggtagcaaacgctgtctccagctgctctagtgaccaacagaaagggcaggccatctccttgtctaatgaagtagtacatccagggccatgaaagagaacagagccaatgagcttagacacagc

SEQ ID NO: 1083 - DNA, 2775 bp, Rattus norvegicus
ctcttctgctcaagatggttgcgtcccgggcaattggcagtctcagtcgcttctctgccttcaggatcctgcgctccagaggctgcatttgcacagctttacaacttcttcctgctttgctgtctagaacccatattaattatggagtcaaaggggatgtggcagttattcggattaactcgcccaattcaaaggtaaatacattgaataaagaagtacaatcagagttcgtagaagtaatgaacgaaatctgggccaacgaccaaatcaggagcgccgtccttatttcgtcaaagcctggctgctttgttgcaggtgctgacatcaacatgctggcctcttgtacaacgccccaagaagcagcacgaatatcacaagaaggacagaaaatgtttgagaaacttgaaaagtcaccaaagcctgttgttgccgccatcagtggatcctgcttgggaggcggacttgagcttgccatagcatgtcaatacagaatagcaacaaaagacagaaaaacagtattaggtgtccctgaagtgttgctgggaatcttaccaggagccggaggtacccagaggctgcccaaaatggtgggtgtgcctgctgcttttgacatgatgctgactggtaggaacattcgtgcagacagagcaaagaaaatgggactggttgaccagttggtggacccgctaggaccaggaataaaatctccagaggaaaggacaattgaatacctagaagaagttgcagttaattttgccaaaggcctggctgacaggaaggtctctgcaaagcagagcaaaggcctgatggaaaagctgacatcgtatgccatgactatcccactttgtctgactacaacattcaaaacagtggaagaaaaagtgaagaagcagaccaaaggcctttaccctgcacctttgaagataattgacgctgtgaagactggacttgagcaaggaaatgatgctggctatcttgccgaatcagagaaatttggagagcttgcattgaccaaagaatcaaaagccctgatggggctttataatggccaggtcctgtgcaagaaaaataaatttggagcgccacagaagactgttcagcagctagccatccttggcgcagggctgatgggggctggcattgcccaggtctctgtggacaagggactgaaaactcttcttaaagacactacagtgacagggctgggccggggacagcaacaagtgttcaaaggactgaatgacaaggtaaagaagaaggcactcacatccttcgaaagggactccatcttcagcaacctgatcgggcagctcgactacaagggcttcgagaaggctgacatggtgattgaggctgtcttcgaggacctcgctgttaagcacaaagtgttaaaggaagtggaaagcgtgactccagaacactgtatcttcgccagcaacacatctgctctcccaatcaatcaaattgctgctgtgagccaaaggcctgagaaggtgatcggcatgcactacttctctcctgtggacaagatgcagcttctagagatcatcacaactgacaaaacctccaaggacaccacagcgtctgccgtggccgtgggtctcaagcaggggaaggtcatcattgtggtcaaggacggacctggcttctacaccaccaggtgtcttgctcccatgatgtcagaagtcataagaatcctccaggaaggagttgaccctaagaagctggacgccttgaccacaggcttcggcttccctgtgggtgctgccaccctggcagatgaagtagggatagatgtagcacagcacgtagcagaagatctaggcaaagccttcggggagcggtttggaggtggcagcgtagaactgctgaaactgatggtctccaagggcttcttgggtcgcaagtctgggaagggcttctacatctatcagtcgggctcaaagaataagaatttgaattctgaaatagataatatcttggtaaacctgaggctgcctgccaagcccgaggtctcctctgatgaagacatccagtaccgtgtgataacaaggtttgtgaatgaggcagtcctgtgcctacaggaagggatcctagccacgcctgaagagggagacatcggagcagtctttgggcttggctttcccccttgtctcggagggcccttccgctttgtggatctgtatggtgctcagaaggtagtggaccggctccggaagtatgagtctgcctatgggacacagtttaccccgtgtcagctactccgcgaccttgctaacaactctagcaagaagttctaccagtgagcaggccgtcccgccctgcccctccacccacgtactaacccagacccggcagtgctgcttctcagccgcgctgtctaaattatcaggaagcaggagaaagaccgaggctagccttggatttgctcctccatgatagtgccttcagccctgtcccgctcttcctcctggtgaagtctgactgtgaattaaatgtttgtacttcatgttggggggtgagccccactgtgcttcttttgcaagccctgcctgagaccccgatcagcagcctagagtaacccagaacacctgctgcctgtgccttccgggaggccagtggggcctggggtgccgagggcattttcgcaccaagccaaacacaggataacattaaaatccagactgtcggcctctgccagcctggtctgttttcctctgcctgcccttgtgtttgagcacccccatcagtaataaagccctgtgctctgagcat

SEQ ID NO: 1084 - DNA, 1115 bp, Rattus norvegicus
ctgtgagggtgtttcgacgcgctgggcggtttgttccttcatcgcattcgttaacaggtcaaaatgcaaatcttcgtgaagaccctgaccggcaagaccatcaccctagaggtggagcccagtgacaccatcgagaacgtgaaggccaagatccaggataaagagggcatcccccctgaccagcagaggctcatctttgccggcaagcagctggaagatggccgcaccctctctgactacaacatccagaaagagtcaaccctgcacctggtcctccgcctgaggggcggcatgcagatcttcgtgaagaccctgaccggcaagaccatcaccctggaggtggagcccagtgacaccatcgagaacgtgaaggccaagatccaggataaagagggcatcccccctgaccagcagaggctcatctttgccggcaagcagctggaagatggccgcaccctctctgattacaacatccagaaagagtcaaccctgcaccttgtcctccgcctgaggggcggcatgcagatcttcgtgaagaccctgaccggcaagaccatcaccctagaggtggagcccagtgacaccatcgagaacgtgaaggccaagatccaggataaagagggcatcccccctgaccagcagaggctcatctttgccggcaagcagctggaagatggccgcaccctctctgattacaacatccagaaggagtcaaccctgcacctggtcctccgcctgaggggcggcatgcagatcttcgtgaagaccctgaccggcaagaccatcaccctggaggtggagcccagtgacaccatcgagaacgtgaaggccaagatccaggataaagagggcatcccccctgaccagcagaggctcatctttgccggcaagcagctggaagatggccgcaccctctctgattacaacatccagaaagagtcaaccctgcacctggtcctccgcctgaggggtggctattaattcttcagtctgcattcccggcgggcactgatggcattactctgcactctagccatttgccccaatttaagtttagaaattacaagtttcagtaatagctgaacctctgttaaaaatgttaataaaggttttgt

SEQ ID NO: 1085 - DNA, 1743 bp, Rattus norvegicus
ccgtcccagcatgcagaaggacgcctcctccagcggcttcctgcccagcttccagcactttgccactcaggccatccacgtgggaccagagccggagcaatggagttcgcgtgctgtggtgctgcccatttcgctggccaccacgttcaaacaggactctccaggccagtcctcgggttttgtatacagccgctctggaaatccgacgaggaattgcttggaaaaagcagtggctgcactggatggggcaaagcactgtttgaccttcgctcggggccttgccgccaccacaacgattacccatcttttaaaagcaggagatgaagtcatttgcatggatgaagtgtatggaggcaccaacaggtacttcaggagggtggcatccgagtttggactgaagatttcttttgtggattgttccaaaaccaaattgctggaggcagcgatcacaccacagaccaagcttgtttggattgaaacacccacaaacccaaccttgaagttggccgacatcaaagcctgcgcacaaattgtccacaaacacaaagacatcattctggttgtagataacactttcatgtctgcatatttccagagacctttggctctgggtgctgatatttgtatgtgttctgccacaaaatacatgaacggccacagtgatgttgtcatgggcttagtgtctgttacttccgatgacctcaacgaacggcttcgtttcctgcagaattctctcggggcagttccttctcctttcgattgttacctctgctgccgaggcctgaagacactgcagatccggatggagaaacacttcaggaatgggatggcagtggcccgtttcctggagtctaatccccgggtagaaaaggttatttatcctgggctaccgtctcaccctcagcatgagctcgccaaacgtcagtgcacgggctgccccgggatggtcagtttctatatcaagggtactctgcagcatgctcaggtcttcctcaaaaatataaagctgtttgctctggctgagagcctgggaggatatgagagtctggctgagcttccagcaatcatgacccatgcctccgtgcctgagaaggacagagctaccctcgggatcagtgacacactgatccgactttctgtgggcctagaggatgaaaaggaccttctcgaagacctgggtcaagctttaaaggcagcgcacccttaaagttcgagtcaaagccggcattccagtgctgccatcagcagcagcagccaaggggccagaccttctgaataactggacagaccattaaggagcatctgcagaacttcgcagtgaacattttaagaccctagtgattttacagctgtaaccttacagggatcttcccttaaggactgtcttctgctaacaggttgttctgttagtatcattctgatagttttgctgtatttgtgttcaaggaagagagttgtattattttggggatcatgttgcttcttttttcctttttctttcttcggtagcctaagatatgttttaatcatgtttacaaaatttagtattgatgttttatgaagttaaattattcaatgaacggtcttaaatcaactgtaggggttttttttttgaaaaattattgaaagtggggggtctttatttaattaccataagccaaaaaaatcaaatatttggaatatctactgtgaaattctagtgattaaaggttgtacttgatacttgttgtttttcttaaatgg

SEQ ID NO: 1086 - DNA, 1689 bp, Rattus norvegicus
tgcagccagctagcgagaaggcgcgagcggcggcgcagccagcagcctcccgccagccggcgagccagtgcgcgtgcgcggcggcggcctcggcggcgaccgggaagcggacgggcgggcgaggcgagcgaggcaggcggtgcgggcgtgcgaggcgaggccgatcgcgagcgacatgggggaccgagagcagctgctgcagcgggcgcgactggcggagcaggcggagcgctacgacgacatggcctccgccatgaaggcggtgacagagctgaatgaacctctatctaatgaagatagaaatctcctctctgtggcctacaagaatgtagttggtgccaggcgatcttcttggagggttattagtagcattgagcagaaaaccatggcagatgggaatgagaagaagctggagaaagtcaaagcctatcgggagaagattgagaaggagctggagacagtttgcaatgatgtcttggctctgctcgacaagttccttatcaagaactgcaatgattttcagtacgagagcaaggtgttctacctgaaaatgaagggcgattactaccgctacctggcagaggtggcttctggggagaagaaaaacagtgtggttgaagcttctgaggcagcgtataaggaagccttcgaaatcagcaaagagcacatgcagccaacacaccccatccggcttggcctggccctcaatttttctgtgttctactatgagatccagaatgcaccagagcaggcctgcctcttagccaaacaagccttcgatgatgctatagctgagctggacacattaaacgaggattcctataaggactccactctcatcatgcagttgctgcgagacaacctcaccctctggacgagcgaccagcaggatgaagaagccggagaaggcaactgaagacccatcaggtccctggcccttcctttacccaccacccccattatcactgattcttccttgccacaatcactatatctagtgctaaacctatctgtattggcagcacagctattcagatctgccctcctgtcccttggaagcagtttcagataaaccttcatgggcatttgctggactgatggttgctttgagccacagagcgctccctttttgaattgtgcagagaagtgtgttctgaacgaggcattttattatgtctgttgatctgtagcaaatccatgtgatggtaattgagtgtagaaaggagaattagccaacacaggctatggctgctatttaaaacaagctgatagtgtgttgttaagcagtacatctcgtgcatgcaaaaatgaatttgaccctctcaccccttctttcagctaatggaaactgacacacgacaacttgttccttcaccatcagctttataaactgtttctcgtgagctttcaggcccctgctgtgcctctttaaattatgatgtgcgcacaccttcttttcaatgcaatgcatcagaggtttttgatatgtgtaacttttttttttggttgtgattaagaatcatggatttattttttgtaactctttggctattgttcttgtgtaccctgacagcatcatgtgtgtcaacctgtgtcaatcatgatgggtggttatgaaatgccagattgctaaaataaatgttttggacttaaaaagagtaaataaatgctgctttggggatattaaaa

SEQ ID NO: 1087 - DNA, 2680 bp, Rattus norvegicus
gcagctgtgagggcttcccggaagatggtgctgattaaggaattccgtgtagttttgccgtgttctgttcaagagtatcaggttggacagctttactctgttgcagaagcgagtaagaatgaaactggtggtggagaaggaatcgaagtcttgaagaatgaaccttatgaaaatgatggcgagaagggacagtacacacacaaaatctaccacctgaagagcaaagtccctgcgttcgtgaggatgattgctcccgagggctccttggtgttccatgagaaagcctggaatgcttacccctactgcagaacaattgtaacgaatgagtacatgaaagatgacttcttcatcaaaatcgaaacatggcacaaacctgacttgggaacattagaaaatgttcacggtttagatccaaacacgtggaaaaccgttgaaattgtccacatagacattgcagatcgaagtcaggttgaaccagcagactacaaagctgatgaggaccctgcgttattccagtcagtcaagaccaagagaggccccctgggacctaactggaagaaggagctggcaaacacccctgactgtcctaagatgtgtgcctataagctggtgaccatcaagttcaagtggtgggggctgcagagcaaagtagagaacttcatccagaagcaagaaaaacggatatttacaaacttacatcgccagctcttttgttggattgacaagtggattgacctgacaatggaagacattaggagaatggaggacgagactcagaaagaactagaaacaatgcgtaagaagggttccgtccgaggcacgtcggctgctgatgcctagatgagcccctgtaggtcagagacattatcaaactgtctacggagtcaaggccaagtgagggggaccagtgcggcctgcgacgactaaagccaccagcgtctcagtgttgacggatgtttccagtgtgtgcctctgacggctcgggcacacttgtgcacactcgagggcacacacacacccatgcacacacactcacactgtatgtatgtctgtagctgtatgtaaagcacatatggctacaggcctagatacacacgagtgtatatatatatgtacatgtgaagatggatcagtaccttttctccaaagtactgcacctgtcttcagcagaaatactaaagaaaatattttcaatatatatacctggaacagatattaatacccatcaacatgatgccctggatggacaaacggactgccatgtggtgccctgtggtgctggctggcgtgcttcgtgaatgccaggtgtggaccagtgtgtacagcctttggttaggtttctgtttttttcaagtcaccacacacacacacacgtttagtctcaacccatcagcaacaactcctacagaaagattttttcaaatttttagatactccagtgactctggaatgtaaactctggatgtatttataactatttatttctgggtggccactatcttccagccaaatccaacaatatctgtcaagtaaggagtgaaagctctttattggtttgcccgagggttggggatatccttttttttaaaaaattgccactttttattggatttttgtattttgaatttcaagtatttttctatatcaaatctagcaaaaaacggtgatgacggtttgtgatttataataaacactgacaatattcagattctggctaagcaaacagggtgatcaggcaattaacctgagtggcactggaggctgtgcagagccattctgtggagttttgtttctgaaatggcttttctggaattacggcctggagactggatggtctgtattgctctcagttcacagggtaggagagtggtcccgcccggctgtttccagttacagtccaagctaggaggaaatgctgatgggagcaggcacagcttgagcatgacacaggcctgtccccgtcctgaggcccagctagacctgggccttgccgacagctctgcttcctcctcctgtatctcctcctcctcccccttcctcttctgtctctactttctcctttttttttaagagaaaggagcagtagctgggaaggattttcttttttttacctttccgtctgatgctattctcctctcgtcagtcctggaaccctgaccagcatcacactgttgaatccttcaggttacacactgccttttaacctccaccctgcagtcagagcacggtggtgacacccctttgttgacaggcttgaccttcatgtcccttctgccctgccctgtgtcccatgggggaaatggcagagagtcccactgcatcacactgccctgttagcctcagcaacaagccctgggttccatgtcctctaagctctagataaaggtggttattccctgggcactgctggaagctgggaaggtcaccaccagaagggtcattgccagccttgtctcctccagtgaaaccagatcacagacatccatagtttctctgagagctggggcacacaaggaaaccagagcccagtatggattcttgtgttgctctagcagctgtggagattgagggatgtggtgaatgcaaagaacccagtttacttggcagtctcctgtgtaaatcacagtaaaacaaagtgaaatcgaaacaagaataaatttgatctcaaaatgaaaaaaaa

SEQ ID NO: 1088 - DNA, 1018 bp, Rattus norvegicus
gctggaacgggtccgtacggcgttgttcttggttcccatcgtaacttaaaagggaaacttacacaatgtccggaggccttgacgtcctgcagatgaaggaggaggatgtcctcaaattccttgctgcaggaacccacttaggtggcaccaaccttgactttcagatggagcagtacatctacaaaaggaaaagtgacggtatctacatcatcaacctgaagaggacttgggagaagctgttgttagccgctcgagctattgttgccattgagaaccctgctgatgtcagcgtcatctcctccaggaacactggccagcgagctgtgctgaagtttgccgctgccacaggagccactccaattgctggccgcttcacacctgggaccttcactaaccagatccaagcagccttcagggagccccggcttctagtggtgactgatccccgggctgaccaccagcccctcacagaggcctcttacgtcaacctgcccaccattgctctttgtaacacagattctcccctgcgctatgtggacattgccatcccatgcaacaacaagggagctcactcagtgggtctcatgtggtggatgctggccagggaagtactccgcatgcgaggaaccatctcccgggagcacccatgggaggttatgcctgatctttacttctacagggacccagaggagattgagaaggaggagcaggctgccgctgagaaggctgtgaccaaggaggaattccagggtgaatggacggcaccagcgcctgagttcactgctgctcagcctgaggtggccgactggtctgagggtgtgcaggtgccctctgtgcccattcagcagttccccacagaagactggagtgcacagccggccactgaggactggtcagcagctcccacagcacaggctactgagtgggttggagccaccactgagtggtcctgagctcctctgcaggtgcctgagcgaagggaaaaaaggtggaaggaaaataaagttcctgaaagctg

SEQ ID NO: 1089 - DNA, 2357 bp, Rattus norvegicus
ggagctacaaacaaagaagctgtgttggaggagggcctgttggggtttcggcagggcacgctgacagagaaaccatggaggaaatagtggggcttcgagagggctcccccaggaagccagtgcctctgcaagaactctggaggccgtgcccacgaatccgcagaaacatccaggggagcctagagtggctgaaagagcggctgttccgtgtgggtgaggactggtacttcctggtggctctcggggtgctcatggctctgatcagctatgccatgaactttgctattggacgtgtggtcagagcacataagtggctgtacagggagattggggacggccacctgctccggtacctctcttggaccgtgtaccccgtggctcttctgtccttctcctccggcttctcacagagcatcacaccatcctctggagggtctgggatccccgaggtgaaaaccatcttgacaggtgtgatcctggaggactacctagacattaagaacttcggggccaaggtggtgggcctctcctgcaccctggcaacaggcagtaccatcttcctgggaaaactgggcccctttgtgcacctgagcgtgatgatcgctgcttacctgggccgcgtgcgcaccaagaccgtcggggaacctgagaacaagaccaaagaaatggaattgttggctgcaggagcagcagtgggtgtggccacggtcttcgccgccccaatcagtggtgttctgttcagcatcgaggtcatgtcctctcacttctccgtctgggattactggaggggcttcttcgctgccacctgcggggccttcatgtttcacctcctggcggtcttcaacagtgaacaggagaccatcacctccatttacaagaccagcttcccagtggacataccctttgacttaccagagatcttcttttttgtggccttgggggccatctgtggcatcctgagttgcgggtacaactactgccagcggacttccttatttttcctcaagtccaatgggttcacctccaaactgctggctaccagcaagcccttgtactcagctctggctgctgtggtcctggcctccatcacctatccacctggtgtgggtcgcttcatggcttcccggctgtctatgtcagagtacttggagacactgtttgacaacaactcttgggcactgatgaccaagaactcgtccccaccctggtcagcggagcctgatccccagaacctgtggttggaatggtgtcatccacagatgactgtctttgggacactagtcttcttcctggtcatgaagttctggatgctgattttggccaccaccatccccatccccgcaggatactttttgcccatctttgtctacggagctgccatcgggcgcctctttggggaggttctatctttggccttcccagagggcattgtggctggaggcaaggtcagtcccatcatgcccggggcctatgctctggcaggtgctgctgccttctcaggggcggtgacccacaccctctccacagcattgctggcctttgaggtatccggccagatcgttcatgcactgcctgtgctgatggccgtgctggcggccaatgccatctgtcagagctaccagccctctttctacgacggcaccatcattgtcaagaaactgccgtacctgccgtggatccgtggtcgtaagattggttcccaccttgtgactgtgggtcacttcatgaactgtaccctcaccacgctggccaaggacatgcccctggaggaagtgatcaaagttgtgatctccacggatgtgactcagtaccccctggtggagacgacagagtctcaggtcctggtgggcattgtcaaaaggacccacttggtgcagtccctccataccgattcagcttcctgggctccaggccagcagccctgtctccaggatatcttggctaacggctgccccacccagccagtgacacttcagctgtccacggagacctccctgcatgagacgcacaacctctttgagctgctgaaccttcagctgctgttcgtgacgtcacgaggcagagctgtgggctctgtgtcctgggtggagctgaagaaagcaatttcaaccctgaccaatccgcccgctcccaagtgagtcagcctgggagtcggcagcctggcgcccagtcgctctcagctgctgcagggcatctccactttgcagaggagaggactccacattcacctctccccaccctgaaggagctggttgtaaatgaagacaccaatgcgttctgtcacatcggacccttggtccttctagggttgtctgctgctaaccaagacttctgagaaaaataaaactgatttctgg

SEQ ID NO: 1090 - DNA, 452 bp, Rattus norvegicus
cttgagcagggggagcatcgggatgttgtgatacgacagggagagatattcctcctgcctgccagggtgccccactccccgcagaggtttgccaacaccatgggcctggtgattgagagaaggcgaatggagaccgagctggatgggctgaggtactatgtgggcgacactgaggatgtcctcttcgagaaatggttccactgtaaggaccttgggacgcagttagcccccatcatccaagagttcttccactctgagcagtaccgaacaggaaagcccaaccctgaccaactgctcaaggagccgccattcccgctgagtacacggtccgtaatggagcccatgtcactgaaggcctggctggagagccactccagggagcttcaggcaggcacatccctaagcctgtttggggacagctatgagacgcaagtcatcgcccacggccaagg

SEQ ID NO: 1091 - DNA, 1500 bp, Rattus norvegicus
taaccgcgccaaccgccaccgaggtgcccggagagaggcggagaggcggcatgagcgaggcgggcgaggccaccaccggcggcaccacgcacccgcaggccgcggccgacgcgcccgccgcggcgcccccggaccccgcgcctaagagcccggcggccagcggcgcgccccaggccccggcgcccgccgcgctgctcgcgggagccccggcgagagccagcccccgggcccgccccggcctcatcagcccccgcgggaagcgaggacgcgagaagaaagttctcgccaccaaagtccttggcactgtcaaatggttcaacgtcagaaatggatatggatttataaaccgaaacgacaccaaagaagatgtgtttgtacaccagactgccatcaagaagaataaccacgtcaagtatctgcgcagtgtgggggatggagaaactgtagagtttgatgtggttgaaggagaaaagggtgctgaagcagcaaatgtgactggcccagatggagttcctgtagaagggagtcgctatgctgctgatcggcgccggtacagacgcggctactatggcaggcgccgaggacctccccgtaatgctggtgagattggagagatgaaggatggagtccccgagggagcgcagctccaggttcatcggaatcccacttaccgcccaaggttccgcaggggacctgctcgcccacgacctgcccctgctattggagaggctgaagataaagaaaatcagcaagcggccaatggtccaaaccagccgtctgcccgccgtggattccgacgcccctacaactacaggcgccgcccccgtcccctcaacgctgtttcacaagatggcaaagagaccaaggcaggtgaagcaccaactgagaaccccgctccagccaccgaacagagcagtgccgagtgaccctggctcccaggcaccttcaccaccagcagggtgaccttaagaattaatgaccattcaaaaacaaggcaaaaagcacacccacgaccttaccaacaccaaagaaacatctaagcaataaaacggaagactaacaagatttggacattagaatgtttactgctattctctacgaaactaacaactgcaaagggaaggagcccgcactgtccatcaagctgcgtcccgggaacctgcacaggcagagagcagcctccccatttcagcaacctagtgctttatatttttttcctggtttttactgttttggtaatatgaattaaaagaagaaatattaataccacatggggattgccccaaccaaagaaatctgaaatatatagtaaatgctctttttcctttgttgttcattttggatgctggtgctaaacttccaagtgtcatgatttaagaagaaattttatgcccttatttattcctaggatgaggggagaacatttttgctttcttacatagctctctctgaaatgtgcagtaacaagttcctcaaaaataaaatttttaccttcaaaga

SEQ ID NO: 1092 - DNA, 1434 bp, Rattus norvegicus
gtccgtgtgccgccacccactccggacacagaatatcagttatggataaaaatgagctggtgcagaaggccaagctggcagagcaggcagagcgatacgatgacatggcagcctgcatgaagtctgtcactgagcaaggagccgagctgtctaacgaggagaggaaccttctctctgttgcttataaaaacgttgtaggagcccgtaggtcatcttggagggtcgtctcgagtattgagcagaagacggaaggtgctgagaaaaagcagcagatggctcgagaatacagagagaagatcgagacggagctgagggacatctgcaacgacgtactgtctcttttggaaaagttcttgatccccaatgcttcgcagccagaaagcaaagtcttctatttgaaaatgaagggtgactactaccgctacttggctgaggttgctgctggtgatgacaagaaaggaattgtggaccagtcacagcaagcataccaagaagcatttgaaatcagcaaaaaggagatgcagccgacacaccccatcagactgggtctggccctcaacttctctgtgttctactatgagatcctgaactccccagagaaagcctgctctcttgcaaaaacagcttttgatgaagccattgctgaacttgatacattaagtgaagagtcgtacaaagacagcacgctaataatgcagttactgagagacaacttgacattgtggacatcggatacccaaggagacgaagcagaagcgggagaaggaggggaaaattaaccggccttccaacctttgtctgcctcattctaaaatttacacagtagaccatttgtcatccatgctgtcccacagatagtttttttgtttacgatttatgacaggtttatgttacttctatttgaatttctatatttcccatgtggttttatgttttaatattaggggagtagagccagttaactttagggagttactcgttttcatcttgaggtggccaatatgggatgtggaatttttacatgagttacacatgtttggcatagttagtacttttggtccattgtggcttcagaagggccagtgttcaaactgcttccatgtctaagcaaagaaaactgcctacatattggtgtgtgctggcggggaataaacaggataatgggtccagtcatgagtgtagtctgtgtgggtactgtaaggcttggagcacttgtgaggctgggacacgaacaccctgtggatgcacgctaagaccgtgtgtctgcgtgcacacccttgaccacagctccagaagttgtctgtagacaaagttgtgacccaatttactctgataagggcagaaacggttcacattccattatttgtaaagttacctgctgtttgccttcattatttttgctacacattttatttgtatttaaatgttttaggc

SEQ ID NO: 1093 - DNA, 6125 bp, Rattus norvegicus
aattcccagggactaaaccaccacccaaagagtacacatggacagacccatggctccacctgcatatgtagcagaggatggccttgttgagcatcagtgggagggaaaacccttggtcctgctaaggcttgatcccccagtgtcagggaatatcagggcggggaggcgggaagaggtgggggtaacacctcatagaaaaaggggcaagcagatgagatagggggtttattgatgggaaccaggaaaggagataacatttgaatgtaatgaataaaaaatatccaataaaaaaaggaaaaaaagaatgtatggtagaaacagtatcaactaatcagacccctcagaactcccagagactaagccacccaccaaagagcatatgatgggtggtccaagacccttggaacatatgaatcagaggactgccttgctgtgcctcagttggagagggtgcacctaatctgatgtgacttgatgcctcaggggaggggatgcagtaggggaagaggggaataccctctcagaggcaaagaggagggggaatgagatgaagaactgtggagagaggaaaccaagaggggagtaacatctggaatgtaaataaataaaattacttactaaataaataaattatttaattataatgaactatattttattaattacactaattgatgaagttagttataataataattattaaataacttaaataaagtagaagtaaatataaaaataaatgtaaggaaagaacaacaacaaaagaatgtgcaatagagcaaactgcacaccttacaacccagcaagcaaaggataacagcactggccagtgttccacaatccctttaaagatcattcctccaatgacctgaaaacttcaaacaggctcttacccctaaagagtcacaacatcccacggtaccaagcctttaacacatggactttttacaatattgaaaatcaaattataataccaaataatcctaaatataatattatgttatgagaccctgaacattgtttaaataatttagaacatgttatagttatttcaggaagcagcatacatgtttggagtaaggccagtcattctaacctgccttgtattaggtacaaggaggatctgtcccatatatatgcctgttagctaatttgacaggaaagttctacccattagctccattccttaaatctgattacaatttgatatatttgatacaggctgagggtaagcctaggaggttcataagtgtcttttaagggggacatttttacatatagaaggctgtcctcaatctcctgtctttctccttcagccttcagagtgctaggagtacagatggccaccacacttggcttatattgtgcattttattcaggctttatacttgtgctagtgaaatgagttagtacatgttcctcctattgaaccatatctctaaattgctaaagtgtgtgtgtgtgtgtgtgtgtgtgtgtgtgtgtgtgtgtgtgtgtgtgtatgcttgagatggggttgttaatgtagcctaactggccctcaaagtcaccgagctatttcaaattcaccaccctgtctcacaatctgaaatattggtatcataaatatgtgtcaccacaccaagcctttgggcagattttcatttgcattaatagatgacagtgccatcttaaagactacaagagactgctaattgagatgtataaattcccttgacttaaatactgaaatgatccttcataagaaggatgggctgcatgcatggtgagaatcttcagggactaagcttatggatttttttgtttcccgaaggtaccatggctgaggaaaccgccccagctgttctggagcggcaccaagggtccttgtactccctttttcctgatcacagtgtgaagaaatactttaaccaagtggatatctccaatggtttggattggtccctggaccataaaatcttctactacattgacagcctgtcctacactgtggatgcctttgactatgacctgccaacaggacagatttgtatgaacatctttattatttttcataataatatttttcttatttttgtatctccttaagccatgtgacaatgtcattatttgtagagtagaggacttcctgatataatgatgatggcacagacttcactaagctgccagtgaaactgtggtcctcaatacatctccagtgtcttatttgagactagggctgtatctgcactagacagtgcagataggccttgacttttcctctccatcactaaaaagggcctccctagagaatgaatcctgccttatcagacagtgccaaaagcaaatatgcaacagaatgtgataaaagagggagactgaaactttggttcctgagtcttatttgatcttagttactagaggcagtatcagggcaaatgaacaacctttgaaatggaaaaataacagaaaagtgcttccaggttggttcagttccatgaatgttctgtaaaatgagccatcactggaaacttcgaggaaagaaattatttagaagaatttagaaaggagaccttgaaactgtttgatgaaaagtgtcagacaggaagagcaaaaccaatcataaaaatgacttgaaaaaatcacaggatttatgtagatttaatcaagggcaaacttttccagtccagatgctttgctttgaactatgtagtgctcctttttatgactattcttacccaatttccttacacatggctttaacctttttccattatacttcaatctgattgctggaatgcccctgccttttgtagctggctgctcctctgcactgtttcctgaggagctgaggatcaaacaatttctttcttttttttttttttttggttctttttttcagagctggggaccgaacccagggccttgctcttcctaggcaagtgctctaccactactgagctaaatccccaaccaaacaatttctttatatgttcactgagatgcaattccagcactccctccctttggatggtcattgtttggatactatgaatcatcttcaaacaccctgtggattttagaatgcccttcctttaagaagcaagctctttcaatactttttcttgatttttgtagaaagtaagacaaagaatatgtctcccaaggttttttgcatgcattgttcatatagtaccatttagctgccttatagatgttagacttggtcaagtatcacttgggaacaagtgatctaatcccagactgacaaatgtctgagatgggttgccaagcctactgaggtgcactctatctatagactctatggtggctgatcctcaagactaatcctaacactgaagcagagattactttaagagtctgaagacaggggttggggatttagctcagtggtagagtgcttgcctagcaagtgcaaggccctgggttcggttctcagctccgaaaaaaagaaaagagtctgaagacagcttgggctacacaatgaatactacaaccttggatgtagtatcagctttatttggcttagtagtagaggagttgtctagcatacataaggttctgaattctatcctcagaactgcaaaaaagaaagaaagaaagaaaggaaggaaggaaggaaggaaggaagaagaaagaaggaagaagaaagaagaaaagggaaaagaaagcatttatatctttataaagacaaaagggagtgaatgtatcccaaatcatatatttaaaatcctttgctaagtgatcagtatttataaccagcttgagaacacactgtttgtcagcattgtgcgacccactgtttggtcatgttttggttttgtttttcaaccatagccaaccgcaggactgtttacaagatggaaaaagatgaacaaatcccagatggaatgtgcattgatgttgaggggaagctttgggtggcctgttacaatggaggaagagtaattcgcctagatcctgagacaggtatgctggtagcaaaatagaatgtcgcacccactccagaaaagaccagtgctagacaccattactaatactgttagagccatattaatggtcttaactgaatgattttggaaataaaagcaaaagctacaactccaaatttatagtcaaaacgtcttttcctgtggaaactcaattctcagaaaaggtacattaaaagttaaatactggataggagccagataatatggtagcttataaacctaagtgtaaggaaggtaaaactaaagggtggtgagtttcgggcaacctgggcgacatagtgatactaagccatgttgggttcagcctatattgactcccttcaaggaacctccgcagtctcttacaccatccctgtcatccatgaatggtccagatgcatagtatatgttggaaatttctagaactaaatatttaataatgtatttggtgacctagggaaaagactgcaaactgtgaagttgcctgttgataaaacaacttcatgctgctttggagggaaggattactctgaaatgtacgtgacatgtgccagggatgggatgagcgccgaaggtcttttgaggcagcctgatgctggtaacattttcaaggtgagatggtcttttttcctgtgtgtgtggaaggggtgcattatggcgggtattctgttaaaaataattgattggtgcttttgcaaacatcccaaacctatttccatttatcatgataagctagtctctctagacttaattttcagttttttcaaatatacattatataaagttcaagatggtgtgtcttacctatttccggtattttaaaatattttcatgtttcaatattatttgtaacatcatctgattgtattgatgtcgtaaagagatgtgtaggtttttaacaatttttgtgatagaacaaacactgatttaaaaaaaacatacacattacaagtttgaaaacacgtgtggaaatactggctttggtgatggacctctgtatctcagcccttgacaatctgaagcataaagatggtgagctcaagctatcttgagacatataacacaggtacttttcttttcaaaaaaaagaggtatagggctggagagatggctcagtgtgttaagagcactgactgctcttccagaggtcctgagttcaattcccagcaaccacatggtggctcacaaccatctgtaacgggatccaatgccctcttctggtttatctgaagacagtaataacagtgtactcataccaataaaatgaataaataaatcctttttgaaaaatagcaataccttcttggcagatgagaaatgatctaataagtgtctctattaatgtgcatccttgctcattggaccagaagtatgtgaatgactgcttgaaccattctgctccaataagcaagcatgcacactgatttacttagttattttataatttatcagtttcactccttttttttcaacagataacaggtcttggggtcaaaggaattgctccatattcctatgcagggtaaactgcagctcttccttgctgtcagaagaaaaagctttgaagacaactggagaattaagggagagaaatcaatgaactttcaatcttgtttttttaatgaggcagtgatattatagcatggttaaactgctttaatttacacttttgattgggtgctggggaataaacctaaagcatggcatattaatgaagaacatatggtaaccatgaactccatctctggattcctttatttacaattttttaaaggttgaatattcgcaccagagaatgacaagtggttttgacaacatactctaggccttctattaaaaacaatctgtagaaaaggagctcaactatcaatcatcctgatcaattgctctggggcttgaaatgagacaatttccattctttttttttgcattccatacttgctgtacataaggcttccaaaaaatcaacgcatagaaacttagttgtaatttataatgattgtgtgacttttcatgtgttattttacaaactaaaatattaccagatgttattcaaacactggagcacaaactgtggttttaactgccacctagtggcctatacaaataaatgcatcacattacaaagaattttctttccatccttttactttt

SEQ ID NO: 1094 - DNA, 1017 bp, Rattus norvegicus
ttcaaagtcctaaaacgcgcggccgtgggttcggggtttattgattgaattccgctggcgcaggatcctctgcagaaagagagagcgcgagagatggagatggacaaacggatttatttagagctgcggaacaggacgccctctgatgtgaaagagctggtcctggataactgtcggtcaattgaaggcaaaatcgaaggcctcacggatgagtttgaagaactggaattcctaagtacaatcaacgtaggcctcacctccatttccaacttaccaaagttaaacaaactcaagaagcttgaattaagcgaaaacagaatctcaggggacctggaagtattggcagagaaatgtccgaaccttaagcatctaaatttaagtggcaacaaaataaaagatctcagcacaatagagccgctgaagaagttagagaatctcaagagcctagacctgtttaactgtgaggtgaccaacctgaatgcctaccgagaaaacgtgttcaagctcctgccccaggtcatgtacctcgatggctatgacagagacaacaaggaggcccctgactctgatgttgagggctacgtggaggatgacgacgaggaagatgaggatgaggaggagtatgatgaatacgcccagctagtggaagatgaagaggaagaggatgaggaggaagaaggggaggaagaggacgtgagtggagaggaagaggaggatgaagaaggttacaacgacggggaagtggatgatgaggaagatgaagaagatgctgctgaagaagaagggagtcagaagcgaaaacgagagcccgatgacgagggccaagaggatgactaaggggaattaacctgtttggggaaattcctattgtgatttgactgtttttacccatatcccctccccctcctattcctgccccccgaaacttatttttttctgattgtagcgttgctgtgggaatgagaggggcaaagtgtactggggattgccgggggtggggtgggggtgggaggggag

SEQ ID NO: 1095 - DNA, 2199 bp, Rattus norvegicus
ccggaaggagttcggcaggtctcccggaccccctttgtgaactacattttgggtagaacattttaatcaccgaaacccttctgaggaaaaaaagactcccactgccccctgcaaaaaaacaaaagcaaaaacaaaaaaaccaaaccccaaacccccaaatctcagtcttagctggtgccaccaaagaagcttttgagccatgtggacttttcttggaattgctactttcacctatttttataagaaatgcggggatgtcaccctggccaacaaggagctcctgctgtgcgtactggtgttcctgtcgctgggcctggtgctctcctaccgctgtcgccatcgaaacgggggcctccttggccgccatcagagcggctcccagttcgctgccttctcagatattctctctgctttgcctcttattggcttcttctgggccaaatcaccccctgaatcagaaaagaaagaacagctggagtccaagaggcgcagaaaagaagtcaatctgtcagagacgacgttaacgggagcagctacctcagtatcgacatcatctgtgacggacccagaagtgatcatcatagggtctggtgtacttggctctgctttggcaacagtactctctagagatggaagaacggtgacagtaatcgagagagatttaaaagagcctgacagaatacttggagagtgtctgcagcccggtggctatcgagttcttcgagagctgggccttggagatacagtagaaagtcttaatgcccatcatatacacggctacgtaattcatgactgtgaaagcaggtctgaagttcaaattccatacccggtgtcagaaaacaaccaagtacagagtggggttgctttccaccatggcaagttcatcatgagtctccggaaagcagctatggcagagcccaatgtaaagtttatagaaggtgttgtgcttcggttactagaggaagatgatgctgtgattggtgtgcaatacaaggacaaggagactggggacaccaaggagctccatgccccgctcactgttgttgccgacgggctcttctccaagttcaggaagaacctcatctccaataaagtctctgtttcctcccacttcgttggcttcattatgaaggatgcaccacagtttaaagccaatttcgcggagcttgttctggtcgatcccagtccagttctcatctaccagatttcacccagcgaaactagggtgcttgtcgatattcgaggagaattgccaagaaacttaagagaatacatgacagaacaaatttacccacagatacctgatcacttgaaggaatcatttctggaggcctgtcagaatgctcgtctgcggaccatgccagcaagcttccttcctccttcctcagtgaacaaacgaggcgtcctacttctgggagatgcgtataacctgaggcatcctcttactggtggaggaatgacagtcgctttaaaagatataaaaatatggagacaactgttaaaagatattcctgacctttatgatgatgccgctattttccaggccaaaaagtcattcttttggtcaagaaaaaggagccattcctttgttgtgaacgtgctggctcaggcgttgtatgaactattttctgctacagatgattccttgcgtcagctccgaaaagcttgctttctttattttaaacttggtggagaatgtttgactggtcctgttgggttgctttctatattgtctcctgaccctctcctattgattcgacacttcttctccgttgcagtctatgccacgtatttctgcttcaagtcagagccatgggctacaaaacctcgggctcttttcagtagtggtgctatactgtacaaagcgtgctctataatatttcctctcatctattcagaaatgaagtatctggttcactgaaagggaaaccacatggaagtcattgggacttgaggaggatgtacatagcctaggactgtgtgtgtgacttctgcagtggtgactcaaggaccaagcttgtgtataagcatgtaaatatatgccttaattcacaattgagaatgaagggtcaataagctagatgtttaaaagaatgattgtttccacaaattaatgttaacactcaagtgtttggatttcagtattggggtgattcaattggggacaatgccaaataaaatgaaggagtggaactcctt

SEQ ID NO: 1096 - DNA, 9731 bp, Rattus norvegicus
ccgccggcctgcggccgagcgagcgcggcggaggcgctggcgctgggcaattcggtgactcctttctcctccggagcgaggaaggaaggaaggagagaaggaaggaaggaagcgaagaaggaggggactgtctccatggaaggttcaggcggaggcgccctcgccttgcgggtgcaccggccgcagagcagttccagccgccgccggctggcccccggcgcgtggagacgggtgaagtccctgagttttgtcaaagccaacgataatcagatctacttgaaagattaagtgaattgatttgattggaacattctctcaacagccagccaataggaagtgtcaggacaatcatgcccatgagaactctcaactgttcaggtgattgcacttcagtgaaactggctgttgaacattgctggagttgatgggcagaatttctcctggactattcatcatcccagtcccatcctagttgagagagatttaaatgccataagaatcctttgtaacgttgcactttgcttttgaagatggacatttctaggatggagagaactgttatagtttggttccaggacattggcatccaatgcccactgactccagtgtgagcctggaaggttccagagagagagggaacaatccacgcgtttgcagacgaccaggaacgcagaagcaacccagctttacaaagcacagcgttggagacacctccatgagtctgcttggcttccgggcaaagtagcacttaagaccttgtgttaaaatggacactggggacacagctctaggacaaaaagctacctcaaggtctggagaaactgacagtgtgtcaggtagatggaggcaggaacaatcagccggtcttaagatgagcactttcagcagtcaggaagggcagagacaaccgcaaatagatcctgaccagatcggaaatgtagcttcagctcagctgttcggttctgggaagctggcctcgcctggcgagggcgtacatcaagtcacagagaagcaatacccaccacaccgtccgagtccctacccatgccaacattcgctctctttccctcagcactcattgccccagggcatgatgcacagcaacaagccgcaccagagcctcgagggccctccctggctcttctctggccctttgccatctgtggcctctgaggacttatttccttttccaatgcacggccacagtagtggttaccctagaaaaaagatctcaagtctcaaccccgcttacagccaatactcccagaaaagtatcgaacaggcagaagatgctcacaaaaaagagcacaaacccaaaaagccgggcaaatacatctgcccgtactgcagcagggcatgtgcaaaaccaagtgtcctgaagaaacacatcaggtcccataccggtgagcggccgtatccgtgtataccttgtggtttctctttcaagacaaagagcaatttgtacaagcacaggaagtctcatgcccacgcaattaaggcaggcttggtacccttcaccgaatcatctgtgtctaagctggacctggaggctggctttattgatgtagaagcagagatccactcggatggtgaacagagcacagacacggatgaggagagctctttatttgctgaggcttctgacaaagtgagccccggccctcccatccctttggacattgctagcagaggtggctaccccggatccttggaagaatccttgggaggtccgatgaaggtgccaattttgattatccccaaaagtgggatcccgctacccaatgagggctctcagtatctgggccctgacatgctcccaaacccgtctttgaatgctaaggccgatgactctcacacagtgaaacagaaacttgcactgagactgtcagagaaaaaaggacaagactctgagccatccctcaaccttctgagcccacacagcaaggggagcacagactctggctacttttctcgctcggaaagtgcagagcagcagataagcccacccaacacaaacgcaaagtcttacgaagaaatcatctttgggaagtactgtcgactgagtcccaggaatacactcagtgttacccccacgggtcaggagcgtaccgccatggggcggaggggcctcgtggaaccattacctcatgtaaacaccaggttggaggtcaagatgtttgaagatcccatcacacagctgattcccagcaaaggagaaatggaccccagtcaagtcaacatgttgaagaccacgaagttcaacagtgagtgtcggcagccacaagccatggcggcatctgttaggaatgaaggaaaaccttacccaggaagtttcccaggcagcaatcccattctcttagaagctcccgtggactcttcaccccttattagaagcaactcaatgccaacttcttcagcaactaacttaagcatccctccttctttgagaggaagccactcgtttgatgaaaggatgacgggctctgatgacgtgttctatcccggcactgtaggcatacctccccagcgcatgcttagacgacaggcagccttcgagctgccatcggtgcaagagggtcacatggagtttgagcaccctgcaagggtacccaagatccttgccggctcatccctgaaggaaaagaaattagttcccggagataggtctggctatgactatgatgcctgccgtaaaccgtataagaagtgggaagaccctgaaacaccaaaacagagctacagagatatctcttgcttgagcaccttcaaacatggaggggaatattttatggacccctcagtgccattgccgggagtgccaaccatgttcgggacgacctgcgagaacagaaagcgcaggaaggagaaaagtgtaggggacgaggaggatacgcctatgatctgtggtggcatggggagtgctcctgggagcatgatgtcctcagagtatgactccaagctgcaggacggaggaaggagtggcttcaccatgactggacatgagagtcttcctcatggttactccgatcgtttagacctggcccggccccagctgccgtctagaagtccgtctcttgggtctgaggatttgccctcggctggtgatcctgacaagatgacagacctgggcaagaagcctccgggaaatgtgatttcggtgattcagcacacaaactcgctgagccggcccaattccttcgaaaggtctgagtcaacagaaatggcagtcagtacacaggacaagaccccctcaccttctgagatgggcgacagtgaggttttggaaggccccgtaagcccagagtgggctcctccaggggatggtgcagagagtggaagcaggccaaccccttcacagcaggtacctcagcactcctaccatgggcaaccaaggcttgttcgccaacacaacatccaggtccccgaaatcagagtcacagaagaacctgataagcccgagaaggagaaggaggctcctaccaaggagcccgagaagcctgtggaagaattccagtggccccagagaagcgagactctttctcaactccctgctgagaagttgcctcccaaaaagaaacgcttgaggctcgcagatatggagcactcctcaggggaatccagtttcgagtccacaggcaccggcctctctcggagtcccagccaagaaagcaacttatcccacagttccagtttctccatgtcctttgacagagacgaaacggtcaagctcaccgcacctcccaagcaggatgagagcgggaagcattccgagtttttgactgtccccgcgggttcatactcattgtctgtcccgggtcaccaccaccagaaagaaatgcggcgttgctcctctgagcagatgccctgtcctcacccgacggaagtcccagaaatacggagtaaatcatttgattatgggaacctgtcccatgctccagtggcgggagcatccccatcaacattatcgccatcccgggagaggaagaaatgctttctggtacgccaggcttccttcagtggctccccagaaattgcccaaggtgaagccggcatggaccccagcgtcaagcaggagcagctggagcagctgcatgctggcctcagggctgcatggaccactgtgctcccacccctgccaggggatgacccagggaagcaggtggtcggtccttgtggccagctgagctcagggccaccgctccaccttgcccagcaacagatcatgcacatggacagtcaggaatctctgagaaatccgttgattcagccaacatcctacatgacaggcaagcacttacccgaacaaccgcacctgtttccacatcaagacgcggtcccgttttctcctatccagaatgccttgtttcagtttcagtacccgactgtctgtatggttcatttgccagctcagcagcctccctggtggcaggcgcatttcccccatcccttcactccacaccctcagaacagctacagcaagcctcctttccaagctgacattcattctagctattccttagagcacgtagcagaacacactggaaagaaatctgctgactatccgcatgcaaaagagcagacttacccgtgctattccggagcatcagggctacactccaagaacctccctccgaagtttccatcagaccctggcagtaaatccactgaggctccgcccactgaacagcttcttcgagaagattttgcctcagaaaatgctgggcctttgcagtccctaccgggaacggtggttcctgttcgcatccagacccacgttccatcctatggaagtgtcatgtacacaagcatttctcagatacttggacagaatagccccgccattgtcatatgcaaggtcgatgagaacatgacccaaagaacactggtaaccaacgcggccatgcaagggataggatttaacatagcccaagtgcttgggcagcgcacaggcttggaaaaataccctctttggaaagtacctcagaccctacccctgggcttggaatcctccatccccttgtgtttaccgtccacctcagacagcgcggcctctctcggaggaagcaagcggatgctgtctccagccagcagtttggagctcttcatggaaaccaagcaacagaaacgggtgaaagaggagaagatgtacgggcagattgtagaagagctcagtgctgtggagttaaccaactcggacatcaagaagggcctctcccgcccccagaagccccagctcgtgaggcaagggtgtgcctcggagccgaaggacggcagctctcagtcaaggtcatcttccttctcctccctgtcaccctcctcgtctcaagaccatccggctgccagcgggcctttccctcccaacagggagatactttcaggttccagggcgccgccgcgacggaagttcagtgggccctcagaaagcagagagtcctccgatgagctggacatcgatgagacctcgtcagacatgagcatgagcccccagagctcttcgctgcccacaggaggcagtcagcaggaagacgaagggaaggcccgcaagctgccagtcagcatgctagtccacatggcctctggtccgggaggaaatgtggcaaattccactcttcttttcacagacgtggcagatttccagcagatccttcagttccccagtctgcggacaacaactactgtgagttggtgcttcttaaattatacaaaacccaattttgtgcaacaggccaccttcaaatcctccgtttatgcttcatggtgcattagttcctgtaacccaaacccatcaggattgaacaccaagaccacgctggccctcctgagatccaaacaaaaaattaccgccgaaatttacactctggctgctatgcacaggcccggaactggcaagctcacatcatccagtgcctggaagcagtttgcacagatgaaacctgatgcacccttcttgtttggcaacaaactagaaaggaaattagggggaaatgtcttaaaggaaagagggaaaggagagattcacggagataaagatcttggatccaaacaaaccgagccaatccgaattaagatctttgaaggggggtacaaatccaatgaagattatgtgtatgtcagaggacgtggacggggaaagtacatttgtgaagagtgtggaattcgctgtaagaagccaagcatgctgaaaaaacatatacgcactcatactgatgttcggccttatgtatgcaagttatgtaattttgccttcaagacgaaaggaaacctaacgaaacacatgaaatctaaggcccacatgaaaaagtgtctggagctgggcgtctcgatgacatcagtagatgagacagaaacagaagaagcagaaaatatggaagatttgcacaaaacatctgagaagcacagcatgtccggcatttcaactgaccaccagttctcagatgctgaggaatctgacggagaggatggagacgataatgatgaagatgatgaagacgatgatgactttgatgaccaaggagatttgacacccaaaacaaggtcaagaagcaccagtcctcagcctcctcggttctcctccttgcctgtcaatgttggcgctgtagcccacggcgtcccctcagatagctctctgggacattcgtcattgatcagctatttggttactctacccagtattcaggtcactcagctcatgacacccagtgactcttgtgaagacacccagatgacagaatatcagaggctgttccagagcaaaagcacagactccgaacccgacaaagacaggttagacatcccaagctccatggacgaagaggccatgttgtcttcagagccaagctcctccccaagggacttctccccctcaagctaccggtcctcaccaggatatgattcttcaccctgtcgagataattcgccaaagaggtatctgatacccaaaggagatttgtcacccagaagacatttatcacctagaagagatctatcacccatgaggcatctgtcaccaagaaaagaagctgcattgaggagagagatgtcccaaggggatgcttcaccaaggaggcatttgtccccacggagaccattgtctcctggaaaagacattacaacaagaagggacctctctcccagaagagagagaagatatatgactaccattagagcaccatctcccagaagggctttataccataacccaccattaccaatggggcagtatctgcaaacagagccaattgtattggggcctcctaatctaagaagaggattacctcaggttccttacttcagtctctatggagaccaagaaggtgcttatgaacatcacggctccagccttttccctgagggtcctactgactatgtcttcagtcatcttcccctccattctcagcagcaagtgcgagctcctatccccatggtgccagttggtgggatccaaatggttcactccttgccgccagccatttccggtttacatcctccacccacattgcctctgcccacagagggctctgaggagaagaaaggagcacccggggaggccctcacccaggatccctacaccctttccaggcggcatgagaaacaagcccctcacgttttgcagtcatctggtctacctagttctccctcctccccacggctattgatgaaacagagtacttcagaagacagcctaaattccacagagagagaacaggaggaaaacatacagacttgtacaaaagccatcgcctcactccggattgcaacagaagaggcagctctgcttggggctgatcagcccacatgggtgcaggagtccccgcagaaacccttggagagtgcacacatcagcattagacactttagcgggcctgagccaggtcagctctgtacctcagccgcccaccctgacttacacgatggtgaaaaggacacttttggtacatcacagactgcagtagcccaccccacgttttacagcaagggcagtgtggatgagaagcaggtggactttcagagcagcaaggaattatctttaagcacagaggaaggcaatgagccctcatcggaaaagaatcgactccattgatctgcaatgcatggacacattcatttccacatttccccctccccccttttgtttttgtttttctagggatagaaataaacgagttgatagcatgcctgtcctaagttacagtagttggctattataaatacttttgttattttgaagacaattagggaaattaacaagtcatcttgagcctgaccaaaacaaaatttgaaattaacctattgggtctggtaactttgaaaaaaattgtacagatgtttgtgccttttctttactttgcttatattcttataagcatttttttagcggtaatttgtacatattttagaatttgtgtatctgctttgtaataaatgtaatctctttcctcttttggacacttggatcttaacgacgtaaagcaaagcagcatctatatatattgtgaggttgcactaaaacatatttttatatgataaaactgaacagcttttatgtacagctctcattctgtaatactaatatttattttgtttcataaactgtacatttttttcttaatgttgtggattgcttttctatgtgaagcatgggttccctgttgcgtaactagaacagaaatgtccattgtaagcaagatatttaaactagaatatcttattctgcacttatgcataagttacaaaaaaaagataaagaacgtatcagtcggttcttaacctgtaaattctttttgtctcttgtttgccggattgacaataacttaagagctgattgtgatttttaaatggatagtaccgtaaagcattaaagtaaacaatgtgctattgtgagtttttttcaaagctttataaatcagttataaataatattaaaagtatttggtcttatgtgaacatgttgatctatatactcaccttaaaaaatatgggaaaaacattccgcccccatgtaaatatgtacaagtgcatcactggtacagttttgtgttactcggttggacacgaggttgccacagacctatgctagagtgtctttaaaattaaagtgagaaagcacatggactgtgtagagcttggttatcggccggcccggtggcttggtaggcagtgctgtgcgctgcctgtggagaagacctgggcttaaaaatcttggttcttgctgcacaggatggtgactggaactaaggctgcatggagggttcgcacttggactcgagggttgggtgtggaagtggggaagagggatggagacctgctccccagctcttcccatcagcctgtccataatggttacagggttaccatcagcattaggaaatgtcaccttaccctttgaatagggaaagagtgtcactcctggctgtctcagggggaatgaagcagagaggccttcaaaagaaagcagctctggggagaaggaagtttttttgtatctaaccttcagaacggcttttgatcagtgttgaaggtgggaagagcctttgcaggtctagaagagcagagcagagggaggggtacagcaacatgtgcacacgcatgcacatgtatgtgcatgcgcacacacaatctgggttatctttgtgctatatagtggattataattctgtgaaaccaagtttgtatattgaattacattaaggagtgttctttaaaaagagaaataaatatacaattacatgctt

SEQ ID NO: 1097 - DNA, 855 bp, Rattus norvegicus
atggcttgccttcttcctgctgctcgacttcctgcaggctttctcttcttagtgctctggggctcagttctaggtgacaagctgctggtggtcccccaggatggcagccactggcttagcatgaaggagatagtggagcacctcagtgaacgcggacacgacattgtggtgctagtgccagaagtcaatttgcttttgggagaatccaaatactacaggaggaaaagcttcccggtcccctacaacctagaagagttgcggacccgctatcgctcctttgggaacaaccactttgctgccagttcccccctgatggctcctctaagagagtacaggaacaacatgattgtcattgacatgtgctttttcagctgccagagcctcctgaaggactcggccaccctcagcttcctcagggagaaccagtttgatgctctgttcacagacccggccatgccctgtggtgtgatcctggctgagtatctcaagctgccttccgtctacctcttcagaggtttcccatgctctctggagcacatgcttggtcaaagcccaagccccgtatcctatgttcccagattctacaccaaattctcagaccacatgacatttccccaacggctggccaacttcattgctaacatcttggagaactacctttatcattgtctgtactcaaagtatgagatccttgcctacgacctcctcaagagagatgtgtccctacctgccttacaccagaactctctgtggctgttacggtatgattttgtgttcgaatacccccggccagtcatgcccaacatgatcttcattggagggaccaactgcaagaagaaggggaacctgtctcag

SEQ ID NO: 1098 - DNA, 858 bp, Rattus norvegicus
atggctcctgcagacgttccagcctctcttcctctcggtctgtgcctgctgctggcctctggctttgggcatgcaggcaagctgctggtggtgcccatggatggcagccactggttcaccatgcagatggttgtggagaagctccttcccaaaggccatgaggtggtggtggttgttccagaggtcagttggcagctgggaaaaccactgaattttacggtgaaaacgtattcagtttctcacactcaggaggatttaaatcgggagttcaagttttttattgactctcagtggaaaactcaacaagagagcggagttcttcctctactgactagccctgcccagggtttcttcgaattactgttttcacactgtaggagtttgtttaaggacaagaagttagtggagtacttgaagcagagttcgtttgatgctgtgtttctggatccttttgatgtgtgtggcttaactgttgccaagtacttttctctcccgtcagtggtcttcagcagggggatattttgtcactatcttgaagaaggctcccagtgccccagtcctccttcatatgtccccagacctatcttgaaactcacagataccatgactttcaaggaaagagtgtggaaccttctttcctacatgggggagcatgcattctgtcccagttttttcaaaactgctaccgacattgcctctgaagttctccagaccccggtgactatgacagacctcttcagcccagtgtccgtttggttgttacgcacagacttcacgttggaattacccagacctgtgatgcccaatgtgatccacattggagggatcaactgccaccaaaggaagccagtttccaag

SEQ ID NO: 1099 - DNA, 870 bp, Rattus norvegicus
atgtccgtggtgtgccggagctcatgttcgcttctgcttcttccgtgccttctgctgtgtgtgttgggtccctctgcgtcccatgctgggaagctgttagtgatccccatagatggcagccactggctgagtatgctcggagttattcagcagctccagcaaaaggggcacgaagtggtggtcatagcacctgaagcttcgatacacataaaagaaggatcattttacactatgaggaagtaccctgtgccattccaaaatgaaaacgtgacagctgcttttgtggaacttgggcggagtgtctttgatcaagatccttttctgctgcgtgtggttaaaacatacaacaaagtcaaaagggactccagtatgctgctgtctggctgctcccaccttctgcacaatgccgagtttatggcctctctggaacaaagccactttgatgctctgctgacagaccctttccttccgtgcggctccattgtggcccagtacctgtctctgcctgctgtgtacttcttgaatgcattgccatgcagcctggatttggaagccacccaatgccctgctccgttgtcctacgtgcccaagagtttgtcctcgaacacagatcgcatgaacttcctgcagcgggtgaagaacatgattattgctttgacagagaactttctatgcagagtggtttactccccctatgggtcacttgccactgaaatcttacagaaagaggtgactgtcaaggaccttcttagtcctgactctatctggctgatgagaaacgactttgtgaaagattaccccaggcccatcatgcccaacatggtttttattggtgggataaactgccttcagaaaaaagccctatcccag

SEQ ID NO: 1100 - DNA, 3466 bp, Rattus norvegicus
agggaataagcggcggggagggagctccccggcaagcgcgcaaccaagtgttgcatggtgaggaattgacagcgttttgggattggcctggactacagcaagaacatgttacctgaggagtagcacaagtctttcactagctgccgagaggagtccacagctgtcatccaccctcaagtgccctacaagtcccaaaggcatcactcactgctcatctgtaatgagccaggccctgagcggcctcggcttcttgctggtgaccggaacaccatccgtgggtcttgaagcgatcacactcggctgaaagatgagtgacgggcaatgggtctgtctctcatcagaagaatttgatcaacttcagaaatactctgaatattcctccaagaagataaaagatgtgttggctgagtttaatgaaggtggaagcctcaagcaatatgacccacacaagcccattagctatgatgtcttcaagctgttcatgagggcatacctggaggtggatcttcctcagccactgagcacaaacctcttcctggccttcagccagaagcccagacaagagacacctgaccacccaaaggagggggccagcagtagtgagccgaatgtctcagattctaatgcggagagcactgccaaagcggatgctgcctgcgctccagacactgaatcaaaaccgatcaagacacaggtaccgtctgaagaactagaggctgcagccccatggggagaacctaacgctccggcttcaagctccgatgcccccatagtgtacctgaaggatgtggtgtgttacttgtccctgatggagaccgggaggcctcaggataaactagaattcatgtttcgtctctatgactcggatgaaaatgaactcctggaccaagcggagctggatcaaattgtgagccaaatgctacatgttgcccagtacctggagtgggatcccacagagctcagacctatactgaaggagatgttgcaaggcatggactacaacaaggatggcttcgtgtctctagaggagtgggtcagtggggggatgaccaccatcccgttgctggtcctcctgggaatggatgactccgcctccaagggggatgggaggcacgcctggaccctgaagcacttcaagaagcccacttactgcaacttctgccacatcatgctgatgggcgttcggaagcaaggcctgtgctgcatctactgtaaatatgctgtccaccaacgctgtgtatccaacagcattcctggatgtgtgaaaacatactccaaagccaaaaggagcggtgaggtgatgcagcacgcgtgggtggaagggaactcctccgtcaagtgtgaccggtgccacaaaagtatcaagtgctaccagagtgtcactgcgcggcactgcgtgtggtgccggatgacgtttcaccgcaaatgtgaattgtcgacagcgtgcgatggtggggaactcaaagaccacattttgctgcctacctccatataccctgtcacccgagaccggcaagcagggaagtccgatagcggtgcggcggccaagggtgaacttgtaatgcagtataagatcatcccaagtccggggacgcatcccctgctggtcctggtgaacccgaagagtggaggaagacaaggagaaagaattcttcagaaattccactacctgctcaaccccaaacaagttttcaacctggacaaaggggggcctacgccaggattgaacttctttcaggataccccggacttccgtgttcttgcctgtggcggagatgggacagttggctggattttggattgcattgacaaggccaacttcacaaagcatccaccggtggctgtcctgcctcttgggacagggaacgacctcgcacgatgtcttcgctggggaggaggttatgaggggggcagcttgaccaaaatcctgaaggaaattgaacagagccccttggtgatgctggaccgttggtacctagaggtcatgcccagggaagaggtggagaacggagaccaggtcccatacaacatcatgaacaactatttctccattggtgtggatgcttcaattgcacacagattccatgtgatgagagagaaacaccctgaaaaattcaacagcaggatgaagaacaagctgtggtatttcgaatttggtacctctgaaacctttgcagctacctgcaagaaactccatgaccacatagagctggagtgcgatggtgttgaggtggacctgagcaatatcttcctggaaggcattgccattcttaacattcccagcatgtacggaggcaccaatctctggggagaaaccaagaagaaccgagctgtgatccgggaaagcaggaagagcgtcacagacccaaaggagctgaaatgttgtgtccaagacctcagtgaccagcttcttgaagtggtgggtctagagggagccatggagatgggacagatctataccggcctgaagagtgcaggcaggaggctagcccagtgctcctctgtcaccattaggactaagaagcttctgccgatgcaagtggatggagaaccctggatgcagccgccatgcatgattaaaatcactcacaaaaaccaggcacctatgatgatggggcctccccagaagagcagcttcttttctctgaggaggaaaagccgttcaaaggactaaacgatatgccaagcaccagctctaccaagaaaggaaagaagaatatacacgcacacacacatgcacacgcaccaatgcagacacacgcgcacacgagcacgcacacacgtacgaacgcacgcatgcacctataaccagaggaagcaaaagccaccttccacctgccatgtggtctacctattttgaaaatggatccactcctaacagagccaatacccatgagatatcccggatggactcagggcccacgaagaccgggttggctcatacagcgactttcacattcccacaggctttagactttgagcctgaaggagacatctccctttttctgcaccacactccagtaaggctccaggctgtaggtttcctcgctacagcaagatcggatgtggtcaagggaaagagctccaacccagaaaacttacacaaaagtccttctgtacaaaaacaaaacagcctacagctctccaagcaaaatccttggcagggctcattgagcacaggatggtctctttgccgtccttcaagcaacagctcctcccttaacttgcagaggaaagccaagaagctgtggaaagccgtttccattcttggttccctctgctgtccatgggtacttgttcgcttcctgaagcatctcttggtgtctgttttgcttagagagcaaacaagcgtgctggggcagcatactttagatgtggtatttattttcatagttcctatgaacacttgggagggagagctgagaaagtggactttatttttcaaattgatgtcataatgttgtgt

SEQ ID NO: 1101 - DNA, 560 bp, Rattus norvegicus
gctgtggcttttgtgagtcatggagttgacagagcatgtttgggttccagggcgacacatctggagactataagaaggccctgctgctcctctgtggaggcgaggatgactgaggagctgcctggagtgccctgggcccgcctgctgcccaccatcagcttccttcagcaccacgcctacttacgttcaatgcctgcctgcctgccacgctgccttactcacacgagtgtgtgctaatgaccaaagctgtctcgaatgaaagcagtgttctgctgttctgtctgacagaccttcccacgtctctcagtctagtatctctaagttgcgttttctatcctcttctaaagcttcatttatattaagttaataaccatattaccttgaacggaaccttagccatgaaattgtgaactcttggaagtgctgtcaatcaagcttagtgctctagctgacctgaaaaattaagatggtcgtaatatcagaaacgttgccgacaaataaacattctcgtccctccaaatcctgtgtaggctcgtgtttagaacgcttatttaacaatg

SEQ ID NO: 1102 - DNA, 2573 bp, Rattus norvegicus
ccgggctcccggcccgggcctcgccatgccgccaccgcccgggcccaccgccgccctgggcactgcgcttctgctgctcctgctggcctccgagtcttcgcacactgtgctgttgcgggcgcgtgaggcggcgcagttcctgcggcccaggcagcgccgcgcctaccaagtcttcgaggaggccaagcagggccacctggaacgggagtgcgtggaggaggtgtgcagcaaggaggaggctagagaggtgttcgagaacgaccccgagacggactatttctatccaagatatcaagagtgcatgaggaaatatggccggcccgaagataaaaacccaaatttcgccacctgtgttaagaacttacctgaccaatgcaccccaaacccctgtgataagaagggcactcaactctgccaagacctcatgggcaacttcttctgcttgtgcaaagatggctggggaggccggctctgtgacaaagatgtcaacgagtgtagtcagaagaatgggggctgcagccaggtctgccataacaaaccaggaagcttccaatgtgcctgccacagtggcttctcacttcaatcagacaacaagagctgccaagatatagatgaatgcacagactcagacacctgtggggatgcgcgttgcaagaaccttccgggctcctactcctgcctctgcgacaaggggtacacttacagctccaaggagaagacctgccaagatgtggatgagtgccagcaggaccgttgtgagcagacctgtgtcaactccccaggcagctatacctgccactgtaatgggcgcgggggcctaaaactgtccccagacatggatacctgtgaggacatcttaccgtgtgtgcccttcagcatggccaagagcgtcaagtccttgtacctgggccgcatgttcagcgggacccccgtgattagactacgcttcaagaggctccagcctaccaggctgctggccgaatttgacttccgtacttttgaccctgagggagtcctcttcttcgccggaggtcgctcggatagcacctggatcgtcctgggcctcagggctgggcgacttgagttgcagctacggtacaatggcgttggacgcatcaccagcagtgggccaaccatcaaccacggcatgtggcaaacgatctctgtggaagaactggaccgcaaccttgtcatcaaggtcaacaaagatgccgtgatgaagattgcggtggctggggggctgttccagctagagagaggcctgtaccacctgaatctcactgtggggggcattcccttcaaggagagtgacctcgtccagccgattaaccctcgcctggacgggtgcatgaggagctggaactggctgaatggggaagacagtgccattcaggaaacggtcaaggccaatacaaaaatgcagtgcttctctgtgacagagaggggctccttcttcccggggaatggatttgccttctatagcctcaactacacccggacatcgctggatgtcggcacggaaaccacctgggaagtagaagtcgtggctcgcattcgccctgccactgacacgggggtgctgatggcactggtgggggacaaagacgtcgtcctcctctctgtggccctggtcgactaccactccacaaagaagctcaagaagcagctggtggtcctggcagttgagaatgttgccctggccctgatggaaatcaaggtgtgcgacagccaggaacacactgtcactgtctccctgcgggatggcgaggccaccctggaagtggatggtaccaagggccagagcgaagtgagcaccgcacagctgcaggagcgactggacctgcttaagacacgtctgcaaggctccgtgctcacctttgtggggggcctgccagatgtacaagtgacttccacacccgtcacggcgttctaccgtggatgcatgactctggaggtaaacgggaagaccctggacctggatacggcctcctacaagcacagtgacatcacctcccactcctgcccgcctgtggagcacgtcacagcctagaccgagctgcaagagttctctacacctaaaagacacggtgaagcagggtcagggacacacagcaccatctcctctcgcatgggccctgcaacactggagcaggtgcagggctacgatgggtactacgtactgtccgtggagcagtaccccgagctggctgacagtgccaacaacatccagttcctgagacaaagcgagatcggcaagaggtaacccccgggccacccctgcgcagattctcctgtagcacaaaccgaaccggactctccaaagagccttccagaatgacactgctctgcagacaccctcggcgcagacacaggcaacacaaaccagaaacaaagacgactttttttttctctaaatgaccttaaaggtgatcggctttaaagaatatgtttacatacgcatatcgctgcactcaattggactggaagtatgagaaggaaaaaaaagcattaaaaaggcaacgttttgccatgaccctctgtaccttcgaggcactgtatttaacaaaagtttt

SEQ ID NO: 1103 - DNA, 1254 bp, Rattus norvegicus
cccgacaggagacagagcacattgtagctctccaactgccggattacctggcgaccacgttgtggtcagaagagtcctgcctgccggccatggagcgctgtgtgagagtgaagtcttgggtagaagagaatcgggcctcctttcagcctccggtttgcaacaagcttatgcaccgggagcagctcaaaatcatgttcgtcggaggccccaacaccaggaaggattatcacattgaagagggagaggaggtgttttaccagctggagggagacatggtgctccgagtcctcgagcaaggagaacaccgggatgtggttatacgacagggagagatattcctcctgcctgccagggtgccccactccccgcagaggtttgccaacaccatgggcctggtgattgagagaaggcgaatggagaccgagctggatgggctgaggtactatgtgggcgacactgaggatgtcctcttcgagaaatggttccactgtaaggaccttgggacgcagttagcccccatcatccaagagttcttccactctgagcagtaccgaacaggaaagcccaaccctgaccaactgctcaaggagccgccattcccgctgagtacacggtccgtaatggagcccatgtcactgaaggcctggctggagagccactccagggagcttcaggcaggcacatccctaagcctgtttggggacagctatgagactcaggtcatcgcccacggacaaggcagcagcaaaggcccgagacaggatgtagatgtgtggctgtggcaactggagggctcctctaaggtgacaatgggaggacagtgtgtggccctggccccagatgacagcctgctggtgcccgctgggttctcgtacatgtgggagcgagcgcaaggctctgtggccttgtctgtgacacaagaccctgcctgtaagaagccactggggtgacccttctgtgtgggcccaaagcagccacagggtgcctgagtgctgtcctgacagctgccctttccagacagctctttcagcctcatgacatctccgtggacattgacagggcccctccgtgatcgtgggctgtcactggcatccaccctgctgtcatgcttagctcaggatgcagaggggattcctaggacaccagtagttcccctctctcctaacagccctacactgtcagcgaggtgcataccgtcctcatgcgcctgtcagcctaacactaagaaatctctcaataaaggcctcctgctgg

SEQ ID NO: 1104 - DNA, 1213 bp, Rattus norvegicus
agacagactccattctttgtgcagtgaggggctccctgcctcgttgggaggcagcgtagtaaacactgcttcggtgctccagacgcctaagggctttcgttacagcgatgccgaagcgggggaagagagcggcagcggaagacggggaagaacccaagtccgagccagagaccaagaagagtaagggggcagcaaagaaaactgagaaggaggccgcaggagagggccctgtcctgtatgaggaccctccagatcagaaaacgtcagccagtggcaaatctgccacactcaagatatgctcctggaatgtggatgggcttcgagcctggattaaaaagaaaggcttggattgggtaaaggaagaagcaccagacatcttgtgcctccaagagaccaaatgctcagagaacaaactcccggctgaactgcaagagctgcctggactcacccatcagtactggtcagctccatcagacaaagaaggatatagtggtgtgggcctactttcccgccaatgcccgctcaaagtctcttatggcattggtgaggaagaacatgatcaagaaggccgggtgattgtggctgaatttgagtcctttatcttggtaacagcctatgttccgaacgcaggaaggggtctggtaagactggagtaccgacagcgatgggatgaagccttcagaaagtttctaaaggacttggcttcccggaaacctcttgtgctgtgtggggatctcaatgtggctcatgaagaaatagaccttcgtaaccccaaaggaaacaaaaagaatgctggttttactccccaggagcgccaaggctttggggaaatgctacaggctgtaccactggctgacagcttccggcatctctaccccaacactgcctacgcttatactttctggacttacatgatgaatgcccgctctaagaatgttggttggcgccttgattactttttgctgtctcactctcttttacctgctttgtgcgacagcaagatccggtccaaggctcttggcagtgaccactgtcccatcaccctttacctagcactgtgacactcccctcaagtagcttcatgctgggaaatagcctcctctcctccaggagaccagtgcgttatctcttcttcaggtgtttactcccctctaaaccaaacttctggtttcctttaaacaatccaagtgaaataaaagtcctacttttcaac

SEQ ID NO: 1105 - DNA, 806 bp, Rattus norvegicus
tgcgaaagctggggctgctatcccagattcgagagctggcaagtggggaagcatggccaagccttgtggggttcgcttgagtggagaagcccgtaaacaggtggatgccttcagacaaaatcttttccaggaggctgaggacttcctttgcactttcttgccacggaaaatcatatccctgagtcagctcttgcaagaggattccctcaatgtggctgacctctcctccctccgggctcctctggacatccctatcccagatcccccacccaaggatgatgagatggaaaccgagcaggagaagaaagaagtccctaagtgtggcttcctccctgggaatgagaagcttctggccctgcttgccttggttaagccagaagtctggactctcaaagagaagtgcattctggtaatcacatggatccagcacctgatccccaagattgaggacggaaatgattttggggtggcaattcaggagaaggtgctggagagagtgaatgctgtcaagaccaaagtggaagccttccagacagccatctccaagtatttctcagagcgtggggatgctgtagccaaggcctccaaggacacccatgtaatggattaccgggccttggtgcacgagcgagatgaagcagcctatggggcgcttagggccatggtgctggacctgagagccttctatgctgagcttcatcacatcatcagcagcaacctagagaaaattgtcaacccaaagggtgaagaaaagccatctatgtactgagcaaaggattagaaggaaaataaatgatttatacttt

SEQ ID NO: 1106 - DNA, 1640 bp, Rattus norvegicus
agagccgtgcgcagcggcgtgtgtggggccgtgtgcagacccgcgtgtggcgcaggcaaggaccctgaaaataaacagccgctgctttgcgagtctccttcttgggtctacgtccgagtctcctctgctgtgggcagctcagacgccgaagctctaactgcagctatgagcagcaacgaatgcttcaagtgtggacgatctggccactgggccagggaatgccctactggtggaggtcggggtcgtggaatgagaagccgcggcagaggtggttttacctcggatagagggttccagtttgtttcctcgtctcttcctgacatctgttatcgctgtggtgagtctggtcatcttgccaaggattgtgatcttcaggaggatgcctgctataactgcggtagaggtggccacattgccaaggactgcaaggagcccaagagagagcgagagcaatgctgctacaactgtggcaagccaggccatctggctcgtgactgtgaccacgcggacgagcagaagtgctattcctgtggggaatttggacatattcaaaaagactgcaccaaggtgaagtgctataggtgtggtgaaactggtcatgtagccatcaattgcagcaagacaagtgaagtcaactgttaccgctgtggcgagtcagggcatcttgcacgggaatgcacaattgaggctactgcctaattattttcctttgtcgcccctcctttttctgattgatggttgtattattttctctgaatcctcttcactggccaaaggttggcagatagaggctgttcccaggccagtgagctttacttgcagtgtaaaaggaggaaaggggtggaaaaaaaaccgaatttctgcatttaactacaaaaaaagtttatgtttagtttggtagaggtgttatgtataatgctttgttaaagaaccccctttccgtgccactggtgaatagggattaatgaatgggaagagttcagtcagaccagtaagcccttctgggtttgagtgtgttcccatgtaggaggtaaaaccaattctggatgcatctaagcttccatgaataactttaattcttagcataatgatggccttggattgtctgacctcagtagctattaaataacatcgagtaacatctgcatcaggccctcatagaacattcagttgagttgggagtaaactgaaaagacaaatgtgttgaaggatatgccagggaatctggctaaagcctaatacaggagcatcttcatcccagtgttgatgctggacgtacagaaggtgatggcaaaggtgtagaacacattttttcaaagactaaatctaaaacccagagtaaacatccgatgctcagagttagcataatttggagctattcaggaattgcagagaaatgcattttcacagaaatcaagatgttatttttgtatactatatcacttagacaactgtgtttcatttgctgtaatcagtttttaaagtcagatggaaaaagcaactgaagtcttagaaaatagaaaatgtaattttaaactattccaataaagctggaggaggaaggggagttttgactaaagttccttttgtttgttttaaattttcatcaatgtatatagaacaaaatgccatattaaaga

SEQ ID NO: 1107 - DNA, 2889 bp, Rattus norvegicus
gaattccgttcagaaaatacgtggttgaaatgttttatttcaaccccaccaccatgacctccgagtggacgacctactacgaaatagcagcgaccgtctccttaacatcgtccgtgagaatagcaaatctattgccggcgtggtactacaactttcgcgtaaccatggtgacgtggggagatccagaactgagctgctgtgacagttccaccatcagcttcataacggcccccgtcgctccagaaatcacgtctgtggagtacttcaacagcctgctgtacatcagctggacctacggggacgccaccactgacctgtcccattcgagaatgctacactggatggtcgtggcagaagggaggaggaaaattaaaaagagtgtgacacgcaatgtcatgacggccatccttagcctgcctccaggagatatctacaacctgtctgtcacagcctgcactgagagggggagtaacacctccatgctccgccttgtcaagctagaaccagctcctccaaaatcactcttcgcagtgaacaaaacgcagacatcggtcaccctgctttgggttgaggagggcgtagctgatttctttgaagtcctctgtcagaagctcgggtctggccacgatggcaaactccaggaaccggtagctgtttcctcccacgtggtgaccatctccagcctcctcccagccactgcctacaactgcagtgtcaccagcttcatagctgtctccacaatggaggtgaaccctaatgtggtggtgatctcggtgctggccatcctcagcatacttttaattggactgctgttagtgacccttgtcattctgagaaagaagcacctgcagatggccagggagtgtggggctggcacgtttgtcaattttgcatccttggagagggaagggaaactcccctacagttggcgtaggagtgtctttactttcttaaccctgctgccctcatgtctgtggactgactatctgttggcattttatattaacccttggagtaaaaatggcttaaagaagaggaaactgacgaaccctgttcagctggacgattttgattcttacatcaaggacatggccaaggactctgactataaattctctcttcagtttgaggagttgaagttgattggactggatattccacactttgctgcagatcttccgctgaaccgatgtaaaaaccgctatacaaacatcctgccgtacgacttcagcagagtgaggctggtctccatgaatgaagaagaaggagcagactacattaatgccaattatattcctggctacaactcacctcaggagtacattgccacccagggaccactgccggaaaccagaaatgatttctggaagatggtcctgcagcagaagtctcgcatcattgtcatgctcactcagtgcaatgagaaaagaagggtaaaatgcgaccactactggccattcacggaagaacccattgcttatggagacatcaccgtggagatggtctctgaggaagaacaggaggactgggccagcagacacttccggatcaattatgctgacgaggcccaggatgtgatgcactttaactacacggcctggccagaccatggcgtgcctccagcaaatgctgccgagagcatcctgcagttcgtgtacactgtccggcagcaagccaccaagagcaaaggacccatgatcatccactgcagcgcgggcgtgggacggacaggcaccttcatagcccttgacaggctcttgcaacacatccgagatcacgaatttgtggacatcttggggctggtgtcagaaatgcgctcataccgaatgtcgatggtacagacagaggagcagtacatcttcatccatcagtgcgtgcagctgatgtggctgaagaagaagcaacagttctgcatcagtgacgtcatctacgagaacgtcagcaagtcctagttcagactcgggagcggtgaggccatgatgtctacccatcctcccttgcttccagaggttttataggggcctttagtcactttgtcaaatcgcgtccccgtgcgcagtttgtggacaaggaggtgatttaacctcctagaaccgagaagacttagccttaaggagcctacaataccgtttggagtcttttcacttctagacgtttgatggaccaaattcactaggatttccagaaaggtcaaaatgctcctcgaagggcgggaagtgcccttcctgatggttcagtcggctctttgctgcttgggctgggtttggttttttcttttttttaagtgcaataatttctgtataatcgtgatttttttttttacattcgcaattcagaatgttgaattgttatccgcccacatcactgatcagtgccacagccttgggaaggaccttatcgcagagttttatctcaccactgagagctaggctacacacaggagactcggtgacaaatcctcaaaggaaatgagcgcgtgtgtccctccctccaacctctcgaagctatgggtcaggagtaggtgggcagagagagaagagaggggttctactcacacgtcagccggtttatctcttcctatttcgaatatgagaacctgtgttcgaagtagagtaggaaaaacatacttgtctgactgtagtggttctccttgttgacagttgggagtttcttccgtggctcttttgaactagtgtcactgtcacggtccttttcaaacagccagagctgactcaacagttttgagtctgactctgaactctgagaaatcttggtgcctagccttcacgtttatttttctgtccacccgtgtacacaagaacagtttctccaagagctataggctgtaaaaatgcactttctttccccacccagaggaactgggaattc

SEQ ID NO: 1108 - DNA, 1304 bp, Rattus norvegicus
gaattccgtctggcctccttccctcccctgggtaccctcttactgtctgccacctctcggctacctccactgagtgcccaggagtcactgaaactcctggtctctgggatatcaccttaaacaccacctgagttgtctgaggaaggactcttggcaaagcagggtcagagtgactttgctggccctgcaatccgagcgtcccctaggccatggctgccccacagcttttccgagctctggtatctgctcagtgggtggcggaggctctgaaatcccctcgcgcctctcagccgctgaagttactggatgcgtcctggtacctacccaagctgggccgcgatgcgcgacgcgagtttgaggagcgccacatcccgggcgccgccttctttgacatcgatcgttgcagcgaccacacatcgccctacgaccacatgctgcctagtgccacgcatttcgccgactacgcgggcagcttgggcgtgagtgccgctacacacgtcgtgatctacgacggcagcgaccagggcctctattccgctccgagggtctggtggatgttccgcgccttcggccaccactctgtgtcgttgctggacggcggcttccgctattggctgagccagaacctgccaattagctctggcaaaagcccctcggaacctgcggagttctgcgcgcagctcgatccctccttcatcaagacccacgaggatatcctggagaacttggatgcccggcgcttccaggtagtggacgcccgcgcagctggccgtttccaaggcacacagccagaaccccgagatggcatcgaacctggacacatccctggctcagtaaacatcccattcactgaattcctgaccagtgaaggtctggagaagagcccagaggagatccaacgcctgttccaggagaagaaggtggacctgtccaagcccttggtagccacatgcggctccggtgtcacagcctgccacgtggtcctgggggccttcctctgtggcaaacccgatgtgcctgtctacgatggctcctgggtggagtggtacatgcgtgcccaaccggagcacgtcatctctcagggccgggggaagaccctgtgaaggacacagtgcagcttgggtgacaccgaaccatcctagtgccagcctggtcactctgaccctgctttgccaagagtccttcctcagacaactcaggtggtgtttaaggtgatatcccagagaccaggagtttcagtgactcctgggcactcagtggaggtagccgagaggtggcagacagtaagagggctgccggaattc

SEQ ID NO: 1109 - DNA, 1397 bp, Rattus norvegicus
ggcttggtcactatggaggagataggcattttggtggagaaaattcaggatgagatcccagcactgtccgtgtctcggccgcagaccggcctgtcctttctgggacccgaacctgaggacctggaggacctatacagccgctacaagaagctacagcaagagctggagttcctggaggtgcaggaggagtatatcaaggatgagcagaagaacctgaagaaggagttcctccatgcgcaggaggaggtaaagcgaatccagagcattccgttggtcattggtcagtttttggaagctgtggatcagaacacagccattgtgggctctaccacaggctctaactactatgtgcgcatcctgagtaccattgatcgggagctgctcaaacccaatgcctcagtggccctgcacaagcacagcaacgcactggtggatgtgctgcctcccgaggccgacagcagcatcatgatgctcacctcagaccagaagcccgacgtgatgtacgccgatattggaggcatggacatccagaagcaggaggtgcgggaggctgtggaactaccactgacgcacttcgagctctacaagcagattggcatcgatcctccccgaggtgtcctcatgtatggcccacctggctgtggaaagaccatgttagcgaaggctgtggcacatcacacgacagctgcatttatccgtgtggtgggctcagagtttgttcagaagtacctgggtgagggcccccgaatggtccgggatgtgttccgcctggccaaggagaatgcacctgccatcatcttcatagatgaaattgatgccattgccaccaagagattcgatgcccagacaggagctgacagggaggttcagaggatcctgctggagctactgaatcaaatggatggatttgaccaaaacgtcaatgtgaaggtaatcatggccacaaacagagcagacaccttggatccagctctacttcggccaggacgcctggaccgcaaaattgaattcccactccctgatcgtcgccagaagaggttgattttctccaccatcaccagcaagatgaacctttctgaggaggtcgacctagaagactatgtggcccgcccagataagatttcaggagccgatatcaactccatctgtcaggagagtggaatgttggctgtccgtgagaaccgctacattgtcctggccaaggacttcgagaaagcatacaagaccgtgatcaagaaagatgagcaggaacatgagttttacaagtgacccctccccacactccccaggcacctgtcccaaaggctagttttctctttacccaggattggtttcgtcaataaatggacgtgattggaaaaaaagcggccgcgaattctagaactagtggatccccc

SEQ ID NO: 1110 - DNA, 2091 bp, Rattus norvegicus
attttcaagggccagcgagagagggagtttggcacagtttgtggagaactcaaagaaaaaccaactctgttcgcagtccccagctcctccagccatggcaccacaagaacgacttctcatccgcgggggtcgcgtggtcaatgatgacttctcacaggtggccgacgtgctagtggaggacggcgtggtgcgggcgctgggacgggacttgctgcctcccggggacacatcccgggggctgcggatcctagatgcagcgggcaagctcgtcctgccgggaggcatcgacacacacacgcacatgcagttcccgttcatgggctcgcagtcagtcgacgacttccaccagggcaccaaggctgctttggcaggaggcaccaccatgatcattgattttgcgattcctcagaaaggcagctccctcattgaagcttttgagacctggcgcaactgggcagaccccaaagtctgctgtgactatagcctgcacgtggcagtgacatggtggagtgacaaggtaaaagaagaaatgaaaacccttgcccaagataaaggcgttaactctttcaagatgtttatggcctacaaagacctgtacatggtgcaagaccagcaaatgtacgctgccttttctcagtgcaaggagataggggccattgctcaggtgcatgccgagaatggagatttgattgcagagggggccaagaagatgctggcactggggataacgggccccgaggggcacgagctgtgccgcccggaagcagtggaggcagaggccaccttgagagccatcaccattgctagcgctgtgaactgccctctatacatcgtgcacgtgatgagcaaatccgcagcgaaggtgatagctgatgcgaagagagaaggaaaggtggtctatggagaaccaattgcagcaggtctgggcacggatggcactcagtactggaataaagaatggcgccatgcagcccaccatgtcatgggtcccccactgagacctgatccatcaacgcctggctttctcatgaatctgttggctaatggcgatctgaccacaacagggagtgacaactgcactttcaacacctgccaaaaagctctagggaaggatgacttcactaagattcccaatggggtgaatggtgtcgaggacaggatgtcggtgatatgggaaaagggcgtgcacagtggcaaaatggatgaaaatagatttgtggcagttaccagcacaaatgcagccaaaatctttaatctttatccgaaaaaaggaagaatagctgtaggctcagatgctgacatggtgatctgggacccagaagccaccaggacgatctcagccaaaacacatcatcaggccgttaacttcaacattttcgagggcatggtttgccatggggtgcccctggtgactatttcaagaggcagagtggtgtatgaagcaggcgttttcgacgtcacagcaggacacgggaagtttattccgcgacaacctttcgctgagttcatttacaaacgagtcaagcagcgagaccagacctgcacacctataccggtgaagcgtgcgccctacaagggagaagtcatcacattgaaacccagagagacaaaagaagacgacacagctgggaccaggatgcagggccattcctgatttggatgctggggttaagcaagtgcaaacagagtgaaggctcccaggctcccctccccaccatgctgccaagccctggagaagcacctgccatttcaactctccaagatcctttaggaaaaattcatcgctctaggcctctttgatttttctctcagaagcaatagcagcctgcctcaccctgcctttgttgctgtggaagattgaggatataaatgaacattattgggatgaaacgtctgcatgaagattcattgaagattcctttttcaaatgccatctctccttaccctagatttctttctttgggtttttaaagatttccttctggtgtaaaggttttgtttgtttgttttgttttaatgtttatgtttgttttaaaaatcagtgattttacatttcattgcaactaataaacatctggagcttcattctgc

SEQ ID NO: 1111 - DNA, 3775 bp, Rattus norvegicus
ggtccccagcggcagtggcagctctgacagcggcccgtgcgctgtgtctccaccgtgccctgcatccctcatcccacatccgccgcgctccccgattcctcacaaacgccggtgcccatcatggggaagcccacgagctcgggatgcgactggcgccgcttcctgcggaatcactggctgctgctctccaccgtggccgccgtggtactgggcatcgtggtaggagtcttggttcgaggacacagtgagctctcgaatctggataaattctactttgcgtttcctggagaaattctgatgcggatgctgaagctcgtaattatgccactgattatatccagcatgatcacaggtgtcgctgcactggattccaacgtatctgggaaaattggtctttgtgctgtagtatattatttctccaccaccgtcattgctgtaatcctaggtattgtgttagttgtgagcatcaagcctggtgtcactcagaaagtgaatgaaatcaacaggacaggcaaaacccctgaagtcagcactgtggacgccatgttggatctgatcaggaacatgttccctgagaacctggtccaagcctgttttcagcagtacaaaaccaagcgtgaagaagtgaagcctgccagtgatcctggggggaaccagacagaggtgtctgtcaccacggccatgacaacaatgtctgagaacaagacaaaggaatacaaaatcgtgggcctgtactcagacggcatcaacgtcctgggcctgattatcttctgcctcgtctttggacttgtcattggaaaaatgggagaaaaagggcagattctggtggatttcttcaatgcgttgagtgacgccaccatgaaaatcgttcagatcatcatgtgttacatgccgatcggtattttgttcctaatcgctgggaagatcatagaagttgaagactgggaaatattccgcaagttgggcctttatatggccactgtcctgagtgggcttgcaatccactccctcgtagtgctgccactgatctatttcatagtcgtgcggaagaaccctttccgctttgccttgggcatggcgcaggctctcctgacagctctcatgatctcatctagctcggcaacccttccagttacattccgctgtgcggaagaaaagaaccacgtggacaagaggatcacaagatttgtgctgcccgtcggcgccaccatcaacatggacggcactgcgctctatgaagccgtggcagctgtgttcattgcgcaagtgaacggcatggacctgagcattgggcagatcatcacgatcagcatcacagccaccgctgctagcattggagctgccggtgtgccccaggctggcctggtgaccatggtgatcgtgttgagtgccgtggggctgcctgctgaggacgtcaccctcatcattgccgtcgactggctcctggaccggttcaggaccatggtgaacgttctgggtgatgcgtttgggacgggcatcgtggagaagctgtccaagaaggagctggagcaggtggatgtctcctctgaagtcaacattgtgaacccctttgccttggagcccacaatcctggataatgaagactcagatacgaagaagtcttacgtcaatgggggcttctcggtagacaaatctgacaccatctcgttcactcagacctcgcagttctagatgcctggccttagatgcctgggactgtgaagggcatctccgagggagccatctcttagccaactccagcgttaaggagcgagaaggacacaaagaatcaactgtacatttagtttgataaacagacctccagattattttctatatttggctctatagcctttgttctctgggtttgggaacgtggggtgggatgaaccgaaggaaattaagaaagctgtgttatctggactttctaattctgtaaaacaaagtttagaagtatatgacgtagtaactgttaggattaggtcatgggtctgggagaaaaattgctttctcaagcacagaccaatatttggggtttttaaacaatattattggctacaaatttttactcaggctttctattggcggggcttcctttgccttctcactttttatagattataattcagctcaaaagccccacccagtcaactagtgcccaattttccattttgcctcattccagcactctcaactactagtgccaaattttccattttgacctcatctccagcaactctcaaactacttttgggaaaaaaaaaaaagcaaaaaggatcagcatagtctgcaataacagtttcaagatattgtggggcttaggggaagggaagggttttttattcaatgtactgtattgggacgctggatgtcagtgttcggtatagaactatatgtatatgtgtgtatatttattattttcatgtaattttcaagacagagatcagtaatgaactatcaatgtgaacgagacgttttccttgtacttgaatcagggctctagctccagccttgctgtgcttcagagctcacgaggacgctctcaggcgctctggggtgagaaatcaagttgctgggttactgtggttcaagccctaaagcagaaactctagggtggcccagccatccattgacaacatctaaggtcaagctccctggagggtgggaaacccttgtcgggcatggaataagtacatttacaaagggaccgtagaggcaagatgtgctccgatagcaacagaaggcttcattcttcaagtacacttcaaggcccacttcacaaggctgtcacctttctgcccttggttttctctgaccaccagggccaaaccagcagtggcgagccatcacctaagctgtttcaaaatgggctgcataaattgaataagcttcatcggaaggtgaccaagctattctaatactgtagtctttttattttagcttttgttattttatttttttagttttttgagacagagtttgtctacatagccctggctatcctggaactcactatgtagactagactggcctcaaactcacagagatcctcctgcctctgcctccttagtgctggcctgaaaggcaagtgccaccatgcccagctctatgctgaattcttacagaataaaaaccataaaagccgggccacaagctactgataccagtggttcaggggaaatgcttcagtctgtctctggagaagactgttctgaaaatctcggccttgtggcttagaatcctctgcctgtctttctcctgctaatttctgaagatggactattaaaattctacacttctgtccccatcctgtaaataaaacccaacaaaaactcgttcttaatgtggacggattcagaacagccatgtttctgtagtgcccttaactcatcttaaacccgtgcttttatatttgagaagccagaaatcgtgccaaagataacagaaaggtaaacgagtgttgaccatggccacctgaagctacagcctgaccctcacagtgaccagtgactccgaactttgaagtacaaatatccctattctttataggaagcaaatctaaatctaaatgaggttggatgaatactttatgtaggaatggctggttctgtccccttatcaggtggttcttgtctgtggcactgaattaattggcagagctgtccacgagttcactggggtcatccttgtaaccagctgcttaacacactgtgctgttatctcaagaggacgcgttccatttttctcaataaacatctcccacactttctccctt

SEQ ID NO: 1112 - DNA, 2152 bp, Rattus norvegicus
atgcacgcgtccgcctgagctgagcgcgctgccttcagcagcatttggagccctgtgggtgaagcctcaggaacagctgcctccagggaccatgtcgaccgtggatgatattctagaacatataggggaattccacctttttcagaaacaaacatttttcctcttagctctgctgtctggtgccttcacccccatctacgtgggcatcgttttcctaggatttacccctgaccaccactgctggagtcctggggcagccaagctgagccagcggtgtggctggagccaggcagaggagctgaactacaccgtgccgggtctgggaccttcggacgaggcctccttcctcagccagtgcatgaggtatgaagtggactggaaccagagcacccttgactgtgtggacccactgtccagcctggctgcggacaggaaccagttgccattgggcccctgcgagcatggctgggtatacaacactcccggctcctccattgtcactgagtttaacctggtgtgtgctcactcctggatgctggacctgtttcagtcagtagtgaacgtggggtttttcatcggtgctatgatgattggctacctagcggacaggtttggccggaagttctgcctcttggtcaccatcctcatcaatgctatctctggggctctcatggcgatttctcccaactatgcctggatgttggtgtttcgctttctccagggactggtcagcaaagcaggctggttaattggctacatcctgattacagaatttgttgggctgggctatcgcagaatggtggggatttgctatcaaatcgccttcaccgttggcctcctgatcctggctggagtggcctatgtgattcccaactggagatggctacaatttgctgtgactctgcccaacttctgcttcctgctctatttctggtgcataccggaatctccaagatggctgatctcccagaacaaaatcgtaaaagccatgaagataattaaacatattgctaagaaaaatggaaagtcggtgccggtctctcttcagaacctgacaccagatgaggacgctggcaagaaattgaaaccttcaatcctggacttggtcagaacccctcagataaggaaacacacgttgatcttgatgtacaattggttcacgagctctgttctctaccagggcctcatcatgcacatgggccttgcaggggacaacatctacctggatttcttctactccgccctggtggagtttccagccgccttcatcatcatcctcaccatcgaccgggttggtcgccgctatccctgggctgtgtcaaatatggtggcaggagcagcctgtctagcctctgtttttatccctgatgatctacagtggctgaaaattaccattgcatgcttgggtagaatgggcatcaccatggcctatgaaatggtctgcctggtcaatgctgagctgtaccccacatacatcaggaatcttggtgtccttgtctgctcctccatgtgtgacattggcggcatcatcacgcctttcctcgtctaccgtctcacggacatctggatggagttcccactggttgtatttgctgtggttggccttgtcgctggggcacttgtgctgttgctacctgagaccaaagggaaggctctgcctgagaccatcgaggatgccgagaatatgcagaggccaagaaaaaaagaaagaaaagagaatttacctccaagtcaagcaagcagaccgtccgctaagctaaaaagaaagggcatcattgctgctggagctgactttgctctctctgaggccagagatggagcttctctctcccctccccccaaacccacacaaaccaacctcacttacccctgaactccatcagcaagagctgtagcttgcacggtctgttgcactgatgtgtcaagctcttcctcccagccaggattttccgcctcactctgctctcagcactcccaggaaatgaccattgctttactggattcgttatggttgttttttcatctttacattctttatttagtttccttctccaccacaacatcaaaccaaaatacccaagggagctgtgggccaggacaaccaactattaaagaagtaagaaatctgaaaaaacaataaacgtgggagaag

SEQ ID NO: 1113 - DNA, 1593 bp, Rattus norvegicus
atggcttgccttcttcctgctgctcgacttcctgcaggctttctcttcttagtgctctggggctcagttctaggtgacaagctgctggtggtcccccaggatggcagccactggcttagcatgaaggagatagtggagcacctcagtgaacgcggacacgacattgtggtgctagtgccagaagtcaatttgcttttgggagaatccaaatactacaggaggaaaagcttcccggtcccctacaacctagaagagttgcggacccgctatcgctcctttgggaacaaccactttgctgccagttcccccctgatggctcctctaagagagtacaggaacaacatgattgtcattgacatgtgctttttcagctgccagagcctcctgaaggactcggccaccctcagcttcctcagggagaaccagtttgatgctctgttcacagacccggccatgccctgtggtgtgatcctggctgagtatctcaagctgccttccatctacctcttcagaggtttcccatgctctctggagcacatgcttggtcaaagcccaagccccgtatcctatgttcccagattctacaccaaattctcagaccacatgacatttccccaacggctggccaacttcattgctaacatcttggagaactacctttatcattgtctgtactcaaagtatgagatccttgcctcagacctcctcaagagagatgtgtccctacctgccttacaccagaactctctgtggctgttacggtatgattttgtgttcgaatacccccggccagtcatgcccaacatgatcttcattggagggaccaactgcaagaagaaggggaacctgtctcaggaatttgaagcctatgtcaacgcctccggagaacatggcatcgtggttttctctttgggatccatggtctcagagattccagagaagaaagcgatggaaatcgctgaggctttgggcagaattcctcagacggtcctgtggcgctacaccggaactagaccatcgaaccttgcaaagaacactattcttgtcaaatggctaccccaaaacgatctgcttggtcatccaaaggctcgggcgttcatcacacactccggttcccatggtatttatgaaggaatatgcaatggggttccaatggtgatgatgcccttgtttggtgatcagatggacaacgccaagcgcatggaaactcggggagctggggtgaccctgaatgtcctggaaatgactgccgatgatttggaaaacgcccttaaaactgtcatcaataacaagagttacaaggagaacatcatgcgcctctccagccttcacaaggaccgtcctatcgagcctctggacctggctgtgttctgggtggagtacgtgatgaggcacaagggggcgccacacctgcgccccgccgcccacgacctcacctggtaccagtaccactccttggacgtgattggctttctcctggccatcgtgttgacggtggtcttcattgtctataaaagttgtgcctatggctgccggaaatgctttgggggaaagggtcgagtgaagaaatcacacaaatccaagacccactga

SEQ ID NO: 1114 - DNA, 1072 bp, Rattus norvegicus
ggcacgagggaaggaagtctctctgtggaggtctgagggaagagctcgcgccaggtagacgctgcgccgtcatcatgggcaagggggaccccaacaagccgcggggcaagatgtcctcgtacgccttcttcgtgcagacctgccgggaggagcacaagaagaagcatcccgactcgtcggtcaacttcgccgagttctcgaagaaatgttcggagagatggaagaccatgtctgccaaggaaaagtcgaagtttgaggatttggccaagagcgacaaagctcgttatgacagggagatgaagaactatgttcctcccaaaggtgataagaaaggaaagaaaaaagatccaaatgctcccaagagaccaccgtctgccttcttcctgttttgctctgaacatcgcccaaagatcaaaagtgaacaccccggcctgtctattggagatactgcaaagaaactgggggagatgtggtctgagcaatctgccaaagataaacaaccgtatgagcagaaagcagctaaactaaaggagaagtatgaaaaggatattgctgcataccgtgccaagggcaaaagtgaagtaggaaagaagggtcctggtaggccaacaggctcaaagaagaagaatgaaccagaagatgaggaagaggaggaggaggaagaagatgatgaagatgaagaggaggaagatgaggatgaagaataagtatctgtcctaaagtgtggagtatatgtgctcaggcaattattttgctaagaatgtgaaattcaagtgcagctcaacattagcttcagtataaaaactgtacagatttttgtatagctgatgagattctttgtagagaaaatactttttaaaaagggtttgtagctttttcaggggctacaacgtacagttagatttaaagcttttgatgttgaatgtttctaaatatttaatggtttctttaatttcttatgatagcaaaaaaaaaaacttcataggaatttctattaccagtaaaagaattttttttttaggatgttgcatttttgtttttttttaaaatttgtaataaaataatgtatatt

SEQ ID NO: 1115 - DNA, 2963 bp, Rattus norvegicus
gacacagtactgccgatgttggacagaggatcgcttaacagaacgaaatctcaaaacaaattaacaggacccggttgcttgatttcccaaatcagaaaaggctcgaaatgtctagaggggctgactgatgcagcggtgacccggactggagacagttggacgcgatcatctctggtgcttttgttcaaccttgaaaccttcgccacaggagacttgcctgagcagagaagcaaacgtggagaaacaaagagagatctagcgaaaagcctctgggaccaaggaggggaggtgggactctgggttggcggtggcacctgctgccggctattaataatagggtcgcgatgcgtttataaggtgtttgattaaacaaagactctatgagagaagaataactagcaacagccccacgtctgagtcgtcgcctccgacctttttcaacgtgggttctttgggccgagcgtcgtttgccgagaactagatctcacctgaccccagacgctgaaaacaagcgctgtggcatcctgggccacccaagctgacaagggcgcgccccctgagcacacgaggtgccccacgagggggagggacccacagccgtcccgcccgcaccgcggtgtccgctgcgggcacctgcagccgagccgccacccgcagtcgcagcgcgtccggcggccgaacccggtcgtcagctcgtcagcacctgctctgcttctctcccgcccgccgccgcgctgcacgcctcgagcgctccctcggccccggcggggaccggggaccccgcagccaccgccatgctgcctgtgctctacaccggcctggcggggctgctgctgctgcctctgctgctcacctgctgctgcccctacctcctccaggacgtgcggttcttcctgcaactggccaacatggcccggcaggtgcgcagctaccggcagcggcgacccgtgcgcaccatcctgcatgtcttcttggagcaagcgcgcaagaccccgcacaagcccttcctgctgtttcgcgacgagacgcttacctacgcccaggtagaccggcgcagcaaccaagtagcgcgagcgctgcatgatcacctgggcctgcggcagggggattgcgtggccctcttcatgggcaatgagccggcctacgtgtggctctggctgggactgctcaaactgggctgtcccatggcgtgcctcaactacaacatccgtgccaagtctctgctacactgctttcagtgctgcggggcgaaggtgctgctggcctccccagagctacacgaagctgtcgaggaggttcttccaaccctgaaaaaggagggcgtgtccgtcttctacgtaagcagaacttctaacactaatggcgtggacacagtactggacaaagtagacggggtgtcggcggaccccatcccggagtcgtggaggtctgaagtcacgttcaccacacccgcagtctacatatatacttcgggcaccacaggtcttccaaaggctgcaaccattaatcaccatcgcctctggtatgggaccagccttgccctgaggtccggaattaaggctcatgacgtcatctacaccaccatgcccctgtaccacagcgcggcgctcatgattggcctccacggatgcattgtggttggggctacatttgctttgcggagcaaattttcagccagccagttttgggacgactgcaggaaatacaacgccactgtcattcagtacatcggtgaactgcttcggtacctctgcaacacgccccagaaaccaaatgaccgggaccacaaagtgaaaatagcactaggaaatggcttacgaggagatgtgtggagagagttcatcaagagatttggggacattcacatttatgagttctacgcttccactgaaggcaacattggatttatgaactatccaagaaaaatcggagctgttggaagagaaaattacctacaaaaaaaagttgtaaggcacgagctgatcaagtatgacgtggagaaggatgagcctgtccgtgatgcaaatggatattgcatcaaagtccccaaaggagaggttggactcttgatttgcaaaatcacagagctcacaccattttttggctatgctggaggaaagacccagacagagaagaaaaagctcagagatgtttttaagaaaggagacgtctacttcaacagtggcgatctcctgatgatcgaccgtgaaaatttcatctattttcacgacagagttggagacaccttccggtggaaaggagagaatgtagctaccacggaagtcgctgacattgtgggactggtagattttgttgaagaagtgaatgtttacggtgtgcccgtgccaggtcatgaaggtcgcatcgggatggcctcgatcaagatgaaagaaaactacgagttcaatggaaagaaactctttcagcacatctcggagtacctgcccagttactcgaggcctcggttcctgagaatacaagataccattgagatcaccgggacttttaaacaccgcaaagtgaccctgatggaagagggctttaacccctcagtcatcaaagataccttgtatttcatggatgacacagaaaaaacatacgtgcccatgactgaggacatttataatgccataattgataagactctgaagctctgaatgttgcctggctcctaacacttccagaaagaaacacaataggcctagcatagccccttcacatgtgtaatccaactttaacttgattaaaggttataggtgtgatttttcctaggaaattattcatttaaaggacaattgtttgtttgtttgtttgttttttattaattacaccagaacgtttgcaagtaaaaagatttaaagtcacttatttttcaatgtgcacctgccatttgtccttgcaaacttagcttcttggagagagggccttatttttttaaagacataataaactatgtaaacact

SEQ ID NO: 1116 - DNA, 4862 bp, Rattus norvegicus
gccgaggctcgcccctccttgcaaggctgctccagagctagcgggcacgcgagctcctctccgggagcttccttccccgaaaggccgggacccagtggcggactcgtggtgagcgaggcagcaccttcgatcccaggagattgacctgttcttaaaagtgaaagaagaaatctaagaaaaacgctatggcaaagagaataaaagctaagcccacttcagacaaacccggaagtccatatcgctctgtcacgcacttcgactcactagctgtcatagacatccctggagcagatactctggataaattatttgaccatgctgtagccaagtttgggaagaaggacagcctggggacccgggagatcctgagcgaagaaaatgaaatgcagccaaatggaaaggtttttaagaagttaattcttgggaattataaatggataaactatcttgaagtgaactgccgagtgaataactttggaagtggcctcactgcactgggactgaaaccaaagaacaccattgccattttctgtgagaccagggcggagtggatgattgcagcgcagacctgctttaagtacaactttccgcttgtgactttatatgctacccttggcaaagaagctgtcgttcatggattaaatgagtctgaggcttcctatctgattactagtgttgaacttctggaaagcaaactgaaggcggcattattagatatcaattgtgttaaacatatcatttatgtggataacaagactatcaatagagcggagtaccccgaggggcttgagattcacagcatgcagtcagtagaggagctgggatccaagccagaaaactcaagcattcctccaagtagaccaactccttcggacatggccattgtcatgtacaccagtggctctactggccgccccaagggagtgatgatgcaccatagcaatctgatagctgggatgacaggccagtgtgagcgcatacctggattaggaccaaaggacacatatattggctacttacctttggctcatgtgctggaactgacagcagagatctcctgctttacctacggctgtaggattggatattcgtcaccactcacactgtctgaccagtccagcaaaatcaagaagggaagcaagggtgattgtactgtactgaaacctacacttatggcggccgttccggaaatcatggatagaatttacaagaatgttatgagcaaggttcaagagatgaattatattcagaagactctatttaaaattgggtatgattataaattagagcaaatcaagaaaggatatgatgcccctctttgtaatctgatactgtttaagaaggtgaaggctcttctaggaggaaatgtccgcatgatgctgtccggcggtgccccactgtccccccagacacaccgattcatgaatgtctgcttctgctgccccattggtcagggctatgggctgacagaatcatgcggtgctggaacagttactgaagttaccgactacactactggaagagttggcgctcctcttatttgctgtgaaattaaactgaaggactggcaggaaggtggttatacagttcatgataagccaaaccccagaggtgaaattgtgattggaggccagaatatctccatgggatattttaaaaatgaagagaaaacagcagaagattattctgtggatgaaaatggacaaaggtggttttgcactggtgatattggagaattccaccctgatggatgcttacagattatcgatcgtaagaaagatctggtgaagctgcaagccggagagtacgtgtctcttgggaaagtcgaagccgcactgaagaattgtccactgatcgacaacatctgtgcttttgccaaaagtgaccagtcttatgtgatcagttttgtggttcccaaccagaaaaagttgactcttttggcacaacagaagggggtagaaggatcttgggttgatatttgcaataatcctgccatggaagctgaaatactgaaagaaattcgagaagctgcaaatgccatgaaattggaacgatttgaaattccaatcaaagttcgattgagcccagagccatggacccctgaaactggtttggtaacagatgccttcaagctgaaaaggaaggaactgaagaaccattatcttaaagacattgagcggatgtatgggggcaaataaaaggcaactgtctacttcacatttgcacaggaggtggcctgatggtttttttagttctagagtttaagcctttgttgatctctctgttaaaatgtaaggtgaatcttctaaagacatgaaacaaaaaaacaaccaaaagtggttacaataaattgcatagtcctagagaagctgaaattgaagacatttccctttagctgtgttattaagtttagagcaaaaattctgttttagaatattagccttagctacacttgtttttctaaagatactccatgctaaagtaaacaaattggacttggactaggtgtagttgaagaaatctacagcttccagtgtctatgtcttcctagttcagaagtttctatcgtaatcattaggacaaaattacgtattaacactactcaaagccgaagttccaccaggctttgaaatcctcttccaaccatttctcttgaagggaaaaaaatcagttgtaataaatggattcagtatcttagaaggtattattttaagctcataattgccatgtaggtgagacatagaatcattataatattgtgaataattacagtgcctgaagttaaaactaaaacaacacacacataccaaaaatatctcataatgtatttgaagggaggctgaattgctcctttggatgtctaagaacttaaatcagcaactgtaattattgaaatgtcttcagaaaaatgtccactttgtaaaagtgacctttctgtgtgtgatctagtcaaaggctgagaccaaggggaacatgttagaaagtcaatcagaattcaataagatacattgcttttctgttagaaagttcatggcatcctaagcattcagaattaggatcctggcatagcactgagcctgggaaagagatttagcctctttaactttgataccagggcttgattttaaaatgtgcttgtattaaattacatttgtaatttatggtctgtttgctgttgctgattgattcttgatcagtagtgtgcatttcagagagcctttcattttgctttaatttcagcaaagcgggttatgataaatgacttcctcgaatcttgttcaaacctacgggtgattaagtgtcttggatgagtctgaggaagttaaagggaagaaaacactgttaacacttttcctgtttgtgaagagtttagaaactggaaatgctagatttgggagaagggcagagttacttgattaaggactgtctgtgcagtaacttgggagtgtgagtttctttttaaatcttcagctaaaatctggaattatatattcttgatagatattcgcacttgaaccatagttactgtatgtaaaaagcaaaaattcttaatactgttattctttgcacttttttcatagtcattttatacacacacacacacacatgcatgtgtatgtgtgtgtgtatatataatatatatatgttgcttacattgtgttgtacagatgtgggccaccactacaacaaaatgagttctttgtgctctaaaatatttataaagaaattatttaaatgttatgtatatggtggtaatattgagaaaaaaaatcatctggtattctgagcaacagcgaaggtttttgtaaaagtttcttttcagtgttgtgcaaactaaaatttgaggcaagttttccctgaagttctatgtgagtattctcatgcttcccatcttgcctttgaagtgtgaaaagacatcaagtagactactagtcagcttctacctactcctagtgcactgtttatccgtttttttttaaaggcttttccaatatatgtatcccatttggaatggtgattttaaaatgtgagtgcatgcagactatcttacttaagatacttgcaccccacccacagccatctcccaaagctggaacactgccaactaggtccttaagaatcacgcattgaatacaaggtcgggtgctgctaattcttcatgaaaatcctaacacacacgttaagggaccagggagatgccactgccctctgacttttcatcaaaaaaaaaatatatatatacatgtttatgtaaacagaactattttccatattcatagtgactttttaagtatttgagcctaaaggttttgatctccattttatacctatttaaatcgttcacaatttcatgtcagccatcaattaaagctgtgcttactgttgattgtgtgtgcatttctaaggtgaacgctcctaattttttgctttaattacatgaaagggtcttatttctttgatatttgtgctcttttttttaatgtagactgaaggtatgattgtgtgacttttaagaaatgaaataccgatgaatgatccatagagtccaaagtgagggagaatgctgtttctttgttcatagagactgactagtaatctttgcctatattttcctggtagcagatgacaaatgtttctacagtgacaagctgagaagaggttaaaggttaaagattgtgtggcattcgggaactggagagatacgttttaattttgaatgtagttacaaattttatattcatatttgtactttctgttaatgcacgattgtagaattgttctgtagattttttgtgtttactcttgaaaggctttgtttgttcttctttttaagtttgcacttgaatcttataaaataaatc

SEQ ID NO: 1117 - DNA, 1899 bp, Rattus norvegicus
gactttgggctcaggatggtggcagcagctatgttgctacggtcctgtccagtgctctctaagggccccacaggcctcctaggcaaagtggctaaaacttaccagttcctatttggtattggacgctgccccatcctggccactcaaggaccaacctgttctcaaatccatcttaaggcaaccaaggctggagcagactctccgtcttggactaagagccattgtcctttcatgctgtcagaactccaagacaggaagagcaagattgtgcagagggcagctccagaagtccaagaggatgtcaagactttcaagacagacctgctgagcttcatggagtcaactacccgaagccaatcagtgcctcgtttccaggatccagagcagactggaggggcacctcccctgctgattcagaataatatgactggaagccaggcttttggttatgaccaattttttagagacaagatcatggaaaagaagcaggaccacacataccgtgtgttcaagactgtgaatcgctgggctaatgcctacccctttgcccaacacttctccgaggcatctatggactcaaaggatgtttctgtctggtgcagtaatgactatttgggcataagcaggcaccctcgtgtcttgcaggccatagaggagaccctgaagaatcatggagctggagctgggggcactcgcaatatctcaggtacaagcaagtttcatgtggagcttgaacaggagctggctgaactacatcataaggactcggctctgctcttctcctcctgttttgtggccaatgattctactctctttacactggccaagcttctgccagggtgtgagatctactcagacgcaggcaatcatgcctccatgatccaaggcattcgtaacagtggtgcagtcaagtttgtcttcagacacaatgacccaggccacctgaagaaacttcttgagaagtccgatcccaagacaccaaaaattgtggcttttgagactgttcactccatggatggtgccatctgtcctctggaggaattgtgtgatgtggcccaccagtacggggccctgaccttcgtggatgaagtccatgccgtaggactatatggaacccggggtgcagggatcggggagcgtgatggaattatgcacaagcttgacatcatctctggaactcttggcaaggcctttggctgtgtcggtggctatatcgccagcactcgggacttggtggacatggtgcgctcctacgctgcaggcttcatctttaccacttcactgcctcccatggtgctctctggagctctagagtctgtgcgtctactcaagggagaggagggtcaagccctgaggcgtgcacaccagcgcaacgtcaaacatatgcgccagctactaatggacaggggctttcctgttatcccctgtcccagccacatcatccccataagggtgggtaatgcggcactcaacagcaagatctgtgatcttctgctcgccaagcacagcatctatgtgcaggccatcaactacccaactgtgcctcgtggtgaggagctgctgcgcttggccccctccccccaccacagccctcagatgatggaaaactttgtggagaagttgctgctggcctggactgaggtggggttgcccctccaagatgtgtctgtggctgcatgcaacttctgccgtcgtcctgtgcactttgagcttatgagcgagtgggagcgatcctactttgggaacatgggaccccaatatgttactacctatgcctaaggagccagctgccttagatgccaaccccacctgcactccccctggggatggtcttcctcctactctctgctttgctgtgtgcttctagctgacttgattctaaaaataaagagcaacctg

SEQ ID NO: 1118 - DNA, 554 bp, Rattus norvegicus
gccgccgccgccgccgccgccgccatgggagtgcaggtggagaccatctcttctggagacgggcgcaccttcccgaagcgcggccagacctgcgtggtacactacacggggatgcttgaagatgggaagaaatttgactcctctcgggacagaaacaagccttttaagtttacactaggcaagcaggaggtgatccgaggctgggaagaaggggtagcccagatgagtgtgggccagagagccaaactgataatctccccagactatgcctatggagccaccgggcacacaggcatcatcccaccacatgctactcttgtttttgatgtggagcttctaaaactggaatgacagaagtggcctcctcccttagctctgcacatggatctgccatggaggaatctggtacctccagatgggtgcacatgaatccatgggagcttttcctgatgtcccaccactctttgtatagacacctactaactgaatgtgttccgtcactcagctttgcttcggacacctccatgtcctcttcccccttctgtatgtgtgtt

SEQ ID NO: 1119 - DNA, 1219 bp, Rattus norvegicus
ccctggctggctccttggctctgtgagaaccctggtcttgtgtacatgaaaacggccaccaatagaaacaacagtcacggccagcccctggctggttgaacgcctgagaccttggtgccctggtacagcctgggttaataaccctgtttatacacttgagtcatccgataaagggcatccaggcagtgggcaggtggccctgtgccctgcaatggccacttcattgactaaagcgatagcaaggccacgtggagcttccagtgcccctcccccaccacttctccaccagtcctgccagggtcagcgtgtatgcattgtgtgtgtgtgtatggtttttttttttttttttcaatgaacatgacttctggagtcaaggttgtttggccagtccccctcccgcccatcaaggatataaatagcactccgtagagagggccacagagccaggaagaaacaggaacaagacacagaccatgagctccagccaatcaggggtctgcccatgccagggctctgcaagccaccccaccattctctacacacttctaagccccggtcccaggaccaggcccatggcacccgcatctcgcagccactgcctgtgccagcaacaccggcctgtgcgcctgtgtgctccacaccgcacctgcagggaggccttggatgtcctaggcaagactgtagccttcctcaggaacctgccgtccttctgcctcctgccccatgaggatcagcgacggctgctagagggctgctggggccctctcttcctgcttgggttggcccaggatactgtgacctttgaggtggccgaggctccggtccccagcatacttaaaaagatcttgctagaggaacccaacagtggtgcccagggtgcccagccaccagacccaccacaaccctcactggctgccgtgcagtggctgcagcactgcctggagtctttctggagccttgagctgggtcccaaggagtacgcatacctgaaaggcactatcctcttcaacccaggtgagcttccagacactcctggatggtggccaaggtgggaggggacagggctcatccagggaaagtgctttcttgggacttggcatccattgtacctttgggtcctttttagcctcaaaaatagatacctcgggttggggatttagctcagtggtagagcgcttgcctatcaggcgcaaggccctgggttcggtccccagctccg

SEQ ID NO: 1120 - DNA, 1743 bp, Rattus norvegicus
ctccagcccagcgatgtgtcctggcctctgggggacatgcttctggttgtggggatcacttttatggctcagcattggaagatcagggaacgtaccccctaccacccaaccgaagtgcactgacttccagagtgccaacctcctcagaggcaccaacctcaaagtccagtttctcctctttaccccctcggaccccggctgtggacaactagtagaagaggacagtgacatccggaactctgagttcaatgccagtctgggaaccaaactaattattcatggattcagggcattaggaacaaaaccttcttggatcaacaagtttatcagagctctcctgcgggcagcggatgctaatgtgattgcagtggactgggtttatggttccacgggcatgtacttctcagctgtggagaatgtggtcaagttgagcctggagatctcccgtttcctcagcaaacttttggagctgggtgtgtcagagtcctcaatccacatcattggtgtcagtctgggggctcatgttggaggcatggtggggcatttctacaaaggccagttgggacggatcacaggtctggatcctgctggaccagagtacaccagagccagcctggaggaacgcttggattctggagatgccctgtttgtggaagccatccacacagacactgacaatttgggtatccggattcctgtcggacatgtggactactttgtcaatggaggccaagaccagcctggatgccctgcattcattcacgcaggttacagttacttgatctgtgatcacatgagggctgtacatctctatatcagtgccttggagaacacttgcccactgatggcctttccctgtgccagctacaaggccttccttgcaggagactgtctggactgctttaaccctttcctgctctcctgtccgaggattggactggtggaacgaggtggtgtcaagattgagccgctccccaaggaagtgagggtctatctccagactacatccagtgccccatactgtgtgcaccacagcctcgtggagtttaatttgaaggagaagagaaaaaaggataccagcatcgaggtcacctttcttggcaacaatgtaacgtcctcggtcaagatcaccatacctaaagatcaccttgaagggagagggatcatcgcccatcaaaacccacactgccagataaaccaggtgaagctcaagttccacatttctagccgggtttggagaaaagacaggactcccattgttgggactttctgtaccgctcctctgccagtcaatgacagcaagaagacggtctgcatccctgagccagtgcgtctgcaagtgagcatggctgttctccgggacctgaaaatggcctgtgtgtagcctgagcctactcttgaggcagaggccggaatttttcgagggcagtgtggcaagggctgtttgcaagcgccatattctaccctgtttctactaagggggggaaggccaaattcttggtggttttctccataagtagttactgtggaagggacaggtgactcatattacagaacttgatctccgtcaccgacttacaaagctttatacagatgccatttcagcttctctatttcaacacaactgtgattgcctcacagccttaagtatctatacttaggattcaatggaaaatgtactcggagaaatgttttaaataaattgtcatggaatatctgaaaaaaaaaaaaaaagaaaaaaaa

SEQ ID NO: 1121 - DNA, 1911 bp, Rattus norvegicus
gatgttgcaaacagttttcctaactatgctgactctggctctggtcaagtcacaggtcacggaggaaaccattacatacacgcaatgcaccgatggatatgaatgggaccctgtaagacagcagtgcaaagatattgatgagtgtgacattgtaccagatgcttgcaaaggtggaatgaaatgtgtcaaccactatggaggatacctctgccttcctaaaacagcccaaattattgtcaataacgaacagcctcagcaagaaacaccagctgccgaagcatcgtcgggtgctgccactgggaccatagctgccaggagcatggctaccagtggtgtgatccctgggggtggcttcatagccagtgctactgcagttgctggtcctgaagttcagacaggccgaaataacttcgtcattcggaggaacccggctgaccctcagcgcatcccttccaacccttcccaccggatccagtgtgcagcaggctatgaacagagtgagcataatgtgtgccaagacattgatgagtgcacctcagggacccacaattgtagattggaccaagtgtgcatcaatttacgtggttccttcacatgccactgtcttcctgggtatcagaagcgaggcgaacagtgtgtggatatagatgagtgctcagtgcccccatactgccaccaaggatgtgtgaacaccccgggttccttttactgtcagtgcaatcccgggtttcagctggcagcaaacaactacacttgtgtggatataaatgaatgtgatgccagcaaccagtgcgctcagcaatgctacaacattcttggctcattcatctgtcagtgcaaccaaggatatgaactgagcagtgacagactcaactgtgaagacatcgatgaatgcagaacctcaagctacctgtgccagtatcaatgtgtcaatgaacctgggaagttctcatgtatgtgtcctcagggttaccaagtggtgcgaagcagaacctgtcaggatataaatgaatgtgagaccaccaatgaatgccgagaagatgaaatgtgctggaattaccatggtggcttccgctgttacccacaaaacccatgtcaagatccctatgttctaacgtcagaaaaccgatgcgtttgcccggtctcaaacaccatgtgccgagacgtgccccagtctatagtctacaaatacatgaacatccgatctgacaggtccgtgccatcagacatcttccagatacaggcaacaacgatttatgcaaacaccattaatacttttcggattaaatctggaaatgaaaatggagagttctacctacgacaaacaagccctgtgagtgcaatgctggtgcttgtgaagtcgttaacaggaccaagagaacacatcgtgggcctggagatgctgacagtcagtagtatagggaccttccgcacaagctctgtgttaagattgacaataatagtggggccgttttcattttaaacttttattcacataaagcctaccacaggcatttaaatcagccaaagaatatcattacattaaagtttattttatttatagctctatctagtacatctatattcaaacagctagactatggtaggaagtgggcatttaatccataagagtcaacatttatctttatcactgtgtgtaaattagacattagtccaacattcttcttgaagagagctaagcatatattatctagtgaaacttggattctttcctacaaaaatggggccaagcaatgatactgttctgtggtgaatagagaaatatacacctccacaaacaatctcatgaggattggccatctaaacatcaagagcaagaagggttttttttttaacttctttgtaagaaaatggaaaaaagtcaataaagatatatttctttagaaaatg

SEQ ID NO: 1122 - DNA, 897 bp, Rattus norvegicus
cgttctgtggcctgccgggtcagcaccatgagctccattggcactgggtatgacctgtcagcctctacattctctcctgatggaagagttttccaagttgaatatgctatgaaggctgtggaaaacagtagtacagctattgggatcagatgtaaagatggtgttgtgtttggggtagaaaaattagtcctttctaaactttatgaagaaggctccaataaacgtcttttcaatgttgatcgacatgttggaatggcagtggcaggtttgttggcagatgctcgttccttggcagacatagcaagagaagaagcgtccaactttaggtctaactttggctataacattcctctaaaacatcttgcagacagagtggccatgtatgtacacgcgtatacactctacagtgctgttagaccttttggctgcagtttcatgttggggtcttacagtgtgaatgatggtgcacagctctatatgatcgatccatcaggtgtttcatatggttactggggctgtgccattggcaaagccaggcaagctgcaaagacagaaatagaaaagcttcagatgaaggaaatgacctgccgtgatgtagttaaagaagttgcaaaaataatttacatagtacatgatgaagttaaggataaagcttttgaactagagctcagctgggttggtgaattaactaaaggaagacatgaaattgttcccaaagacgtaagagaggaagcagagaaatatgccaaggaatctttgaaggaagaagatgaatcagatgacgacaatatgtaacatttcaccatcctctggtgtccatttctgtgacagttgcatatggctagcaccatggattatatatacccactgaccaattttcattaaattttgtcttat

SEQ ID NO: 1123 - DNA, 1872 bp, Rattus norvegicus
atgatccaaacaacggccccacccgtcaaagagagcagcttcgtggaaaagatgaagaaaacgggaaggaacattatcgtattctatggctcccagacgggaaccgctgaggagtttgccaaccggctgtccaaggatgcccaccgctacgggatgcggggcatgtccgcagaccctgaagagtatgacttggccgacctgagcagcctgcctgagatcgacaagtccctggtagtcttctgcatggccacatacggagagggcgaccccacggacaatgcgcaggacttctatgactggctgcaggagactgacgtggacctcactggggtcaagtttgctgtatttggtcttgggaacaagacctatgagcacttcaatgccatgggcaagtatgtggaccagcggctggagcagcttggcgcccagcgcatctttgagttgggccttggtgatgatgacgggaacttggaagaggatttcatcacgtggagggagcagttctggccagctgtgtgcgagttctttggggtagaagccactggggaggagtcgagcattcgccagtatgagctcgtggtccacgaagacatggacgtagccaaggtgtacacgggtgagatgggccgtctgaagagctacgagaaccagaaaccccccttcgatgctaagaatccattcctggctgctgtcaccgccaaccggaagctgaaccaaggcactgagcggcatctaatgcacctggagttggacatctcagactccaagatcaggtatgaatctggagatcacgtggctgtgtacccagccaatgactcagccctggtcaaccagattggggagatcctgggagctgacctggatgtcatcatgtctctaaacaatctcgatgaggagtcaaacaagaagcatccgttcccctgccccaccacctaccgcacggccctcacctactacctggacatcactaacccgccacgcaccaatgtgctctacgaactggcacagtacgcctcagagccctcggagcaggagcacctgcacaagatggcgtcatcctcaggcgagggcaaggagctgtacctgagctgggtggtggaagcccggaggcacatcctagccatcctccaagactacccatcactgcggccacccatcgaccacctgtgtgagctgctgccacgcctgcaggcccgatactactccattgcctcatcctccaaggtccaccccaactccgtgcacatctgtgccgtggccgtggagtacgaagcgaagtctggccgagtgaacaagggggtggccactagctggcttcgggccaaggaaccagcaggcgagaatggcggccgcgccctggtacccatgttcgtgcgcaaatctcagttccgcttgcctttcaagtccaccacacctgtcatcatggtgggccccggcactgggattgcccctttcatgggcttcatccaggaacgagcttggcttcgagagcaaggcaaggaggtgggagagacgctgctatactatggctgccggcgctcggatgaggactatctgtaccgtgaagagctagcccgcttccacaaggacggtgccctcacgcagcttaatgtggccttttcccgggagcaggcccacaaggtctatgtccagcaccttctgaagagagacagggaacacctgtggaagctgatccacgagggcggtgcccacatctatgtgtgcggggatgctcgaaatatggccaaagatgtgcaaaacacattctatgacattgtggctgagttcgggcccatggagcacacccaggctgtggactatgttaagaagctgatgaccaagggccgctactcactagatgtgtggagctag

SEQ ID NO: 1124 - DNA, 1458 bp, Rattus norvegicus
gagggtttaggctggtctccggtgacctcctagtcctaaatcttgatacccttgcaagagctttgagcgtgtggggtcccgggcgttcggggtcccgggtgtgtgcggtttgtatagcctgaagccggggtcctccgcgctcgcgtcctccgcagctggactgaagagacgcgtcccagccctgcggggatggaacggaccgagctgctgaagccccggaccctggccgacctcatccgaatcttgcatgagctcttcgccggggacgaagtcaatgtggaggaggtgcaggctgtgctggaagcctacgagagcaatcctgccgagtgggctttgtatgccaaattcgatcaatacaggtatacccgaaaccttgtggatcaaggaaatgggaagtttaatctgatgattctgtgctggggtgaagggcatggcagcagtattcacgatcacacggactcccactgctttttgaagctgctgcaaggaaatctaaaggagacattgtttgactggcctgacaagaaatccaacgagatgatcaagaagtctgaaagaactttgagggaaaatcagtgtgcctacattaatgattctattggcttacatcgagtagagaacgtcagccacacagagcctgctgtgagccttcacttgtacagtccacctttcgatacatgccatgcctttgaccaacgaacagggcataaaaacaaagtcaccatgacattccacagcaaatttggaatcagaactccatttacaacttcaggttcactggagaacaactaagacctgccaagcctttcaaagttttgcttctgggtcgttggaatgttttaccttggataagagaggccacccatcatttgctgtccagttatacattttaataagtccatgctcagtgtgtatactaaggaagcaaaccatcccctgagctatgcaggagaaaaatcccactaaagaaaaagtcacttgatttttaatagccaaatcaccttgctcccagttcttctgtcttctaactccatggaaattctattgggagttctcagtggggttttttttcaaccttaggaaagcacttctggtctctgaactctaataatcaataagtaaaaatgaagaaaccacaagctatcacatgtctgttttcatacctggaagtctaagtgtggaaatctttaatttactttgtatgttcttaatgtttgacaagaatttttttaaatcttggttttcagttttttcaaccctgtttgacaaattcctatgctgtggagactagggatgcagatagcagtttggtgtttggtagtgaacagcagtggggccagaaatgtgcatgtatccagacctcctgcaaataaaaactgaaactcatgtgtaatgtgtgccaccaccttaagctgccaccaaaattgccaaacgactttaataaaactggatttgaga

SEQ ID NO: 1125 - DNA, 2121 bp, Rattus norvegicus
cgcgctctgaacccgtcgtctgaaccctctctgaaccttcctgaagctggaagatttcaccctgatggctgactcaaaaccactcagaaccctggatggggaccctgtgcctgtggaggctttgctccgggacgtgtttgggattgtcgtagatgaggccattcggaaggggaccaatgcctctgagaaggtctgcgaatggaaggagcctgaagagctcaagcagctgctggacttggagctgcagagccagggcgagtctagggagcggatcctggagcgctgccgggctgtgattcattacagtgtcaagactggtcacccccggttcttcaaccagctcttctcaggattagatccccatgctctggccgggcgcatcattacggagagcctcaataccagccagtacacatatgagattgcccccgtgtttgtgctcatggaagaggaggtgctgaagaaactccgtgcccttgtgggctggaacactggggatggggtcttctgtcctggtggttccatctctaacatgtacgccataaacctggcccgctttcagcgctacccagactgcaagcagaggggcctccgggccctgccacccttggccctcttcacttcaaaggagtgccactactccatcaccaagggagctgcttttctgggacttggcaccgacagtgtccgagtggtcaaggctgatgagagagggaagatgatccctgaggatctggagaggcagatcagtctggcagaggctgagggctcggtgccatttctggtcagtgccacctctggtaccaccgtgctaggggcctttgaccccctggatgcaattgccgatgtttgccagcgtcacgggctgtggttacacgtggatgccgcctggggtgggagcgtcctgctgtcccggacacacaggcatctcctggatgggatccagagggctgactccgtggcctggaaccctcacaagcttctcgccgcggggctgcagtgctctgctcttcttctccgggacacctcgaacctgctcaagcgctgccacgggtcccaggccagctacctcttccagcaagacaagttctacaacgtggctctggacaccggagacaaggtggtgcagtgtggccgccgcgtggactgtctgaagctgtggctcatgtggaaggcgcagggtgggcaagggctggagtggcgcatcgaccaggcctttgctctcactcggtacttggtggaggagataaaaaagcgggaaggatttgagttggtcatggagcccgagttcgtcaacgtgtgcttctggtttgtgcctcccagcctgcgggggaagaaggagagcccagattacagccagaggctgtctcaggtggcccctgtgctcaaggagcgcatggtgaagaagggaaccatgatgatcggctaccagccccatgggacccgggccaacttcttccgaatggtggtggccaaccccatactggtccaggccgatatagacttccttctgggcgaggctggagcgtctgggccaggacctgtgagctgcttcctctctctgccccacccaagctctgcataagctcctgggttcccaaaagcgacctttctaggaaacagtggccttgactgtgtgagcccccacacactaactctcctagctaagtattggctgccagacggtgtctaagcacactacagtctgttcttacgaaatgtgcttcttttaagtcggtcatagtggtacacaccgttaataccagcactggggaggcagaggcagacacaagcagatctcttgagtttgaggccagcctggtctacagagctggcctacacagaaaaaaaacctgtctcaaaaaaaaagaaaggaaggaagaaagaaaggaaaagaaagaaatatttttcattaagattatgtctataaaaaattgttattaatatgagagatatggtacgatgtattaagaaagctagatatgggggttggggatttagctcagtggtagagcccttgcctaggaagcgcaaggccctgggttcggtccccagcttcgaaaaaaaggaaccacaaaaaaaacggcccgctctagaactagtggatcccccggcctgcag

SEQ ID NO: 1126 - DNA, 438 bp, Rattus norvegicus
  misc_feature (1)..(438): n = a or c or g or t
ggcttcaatggattttattagccttctttcatgtactgactgggtataggaggccttccagaggaagaggcctgcaagtnagaggctcaggagaagccaaatcactgacacccagagctggttagggtgggatggacaagatctgagcgattcctcttctggaggagggaacgaacagtgctgctgaggcatgtnacccacccagccagacactcttcacagaacagttctggagggtgtggtgaaggatgtcctgctccatgcagggatgggtgtcannngaggaagggaggagtttatcagaaggcaagaggaagtaacaaactgagaggagcggaggaggaggaaagcagttaagctgccttcgtctgcaagcctccaggatggcacggaagatggctgcagccgcgacttctccaggatctggctgatctagtt

SEQ ID NO: 1127 - DNA, 408 bp, Rattus norvegicus
  misc_feature (1)..(408): n = a or c or g or t
ggggtgttgggggcattgcaccgtttatttccagacaccgagggcgaggtgggggaatccatctgcctccccccacccttgctacatttggcttaatcaagacttttctcacccctatgttgtgcaagacagagaaaaacaccccccaccccacccgaggaggacctaggcataacaggagcatgggtgaaggtggggttcaagtattcacaggtttagggggggtcacattgcaaccagatccacagttgcttttgctggtgtagttctctagcgtganaacctcccactgaatgcccaccccttcccctgtcagagtgactgccctccccagcagggaggcactggggagaaggtgagggtcttcccttacccactaggttggtagcagtggtcaagggaggcact

SEQ ID NO: 1128 - DNA, 341 bp, Rattus norvegicus
  misc_feature (1)..(341): n = a or c or g or t
cagaaccatgcctatnatactgggatactggaacgtccgcgggctgacacacccgatccgcctgctcctggaatacacagactcaagctatgaggagaagagatacgccatggggacgctcccgactatgacagaagccagtggctgantgagaagttcaaactgggcctggacttccccaatgtggagagacagaggaggagcggattcgtgcagacattgtggagaaccaggtcatggacaaccgcatgcagctcatcatgctttgttacaaccccgactttgagaagcagaagccagagttcttgaagaccatccctgagaagatgaagctctactct

SEQ ID NO: 1129 - DNA, 376 bp, Rattus norvegicus
  misc_feature (1)..(376): n = a or c or g or t
ctttgataaacaagtgtttatttctaactcaatatggtacaatgtatatgatattgtgagcacacagtatgcatatagatatataatattcacttttacaaacatacatacatatagacaaaagccattacccatgagtgttagtatccnctgttgggacaaaacacttgatacaactgaaatgagtgangatttattttggttcatggctttggttcatggttctttggcctgaggcaaaactgaacatcatagaaagaaacacttggcaaagaagagtgcttccctcatgacagaaaggagactgggttgagggcaagatatagcccttcagtctttcacttcctgcaaataggcctgatcggctaactgttca

SEQ ID NO: 1130 - DNA, 351 bp, Rattus norvegicus
  misc_feature (1)..(351): n = a or c or g or t
cggagctggggactgaacccagggccttgtgcttgcnaggcaagcgctctaccactgagctaaatccccaacccctagagcagacactcttaagtggcacagtggtaaccgggctcctagagtgtcagaaccctgacatctttcttttcagagacagagggggccggatggaggggaagcagcctctgctccttaccttactctgcaacactgagaaaccagaaaaaaagacctgggactatattaagactcccaaagtaaaactatatggaagtgtttattttttaaagtctagtaccagagaacaggacagacatgacagttactactcacaaggggcagtgtcccact

SEQ ID NO: 1131 - DNA, 312 bp, Rattus norvegicus
gggagagattacctcataccatgtcgcttgcaccaatcaccactctcctgtcgcggcttctctgggcagacggaggggtctggaccaacaggaaaggccttggcccatccccatggtgaccggagctgtatataaggggcgcatccggcccaagtgccggcaggttctcttacatcgaccgcttaagagtcgcgctgtaagaagcaacacctcctcctcgcctccgccatccacccggcagccgcgaagcagcaaccatggtgagcaaaccttcccgagttctcaggagcgggtgggtgtcagcccggctca

SEQ ID NO: 1132 - DNA, 4689 bp, Rattus norvegicus
ctgaacacccatccggtgagacaggagggcaggtttccaagcgccgctccgccacacttgatctcagcgctgggaaagtgaagcgagcaaccgacagccacgatgccggcccacatgctccaagagatctccagttcctacacgaccaccactaccatcacagagcctccttccggaaacctgcagaatggacgagagaagatgaagaaggtgcccctctatctggaagaagacatccgtcctgaaatgagagaagatatccacgaccccagctaccaggatgaggaggggcccccgcccaagctggagtacgtctggaggaacatcatcctcatggccctgctgcacgtgggagccctgtacgggatcacactgatcccctcctccaaggtctacaccttgctctgggggatattttactaccttatcagtgccctgggcatcacagccggggctcatcgcttgtggagccacaggacttacaaggctcggctgcccctgaggatcttcctcatcattgccaacaccatggcgttccagaacgatgtatatgaatgggcccgggatcaccgcgcccaccacaagttctctgagacacacgccgaccctcacaactcccgccgtggctttttcttctctcacgtgggttggctgcttgtgcgcaaacacccggctgtcaaagagaagggcggaaagctggacatgtctgacctgaaagctgagaagctggtgatgttccagaggaggtactacaagcctggcctcctgctcatgtgcttcatcctgcccacactggtgccctggtactgctggggcgaaactttcctgcacagcctgttcgtcagcaccttcttgagatacactctggtgctcaacgccacctggctggtgaacagcgctgcccacctctatgggtatcgcccctacgacaagaacattcaatctcgggagaacatcctggtttccctggggtccgtgggcgagggcttccacaactaccatcacgccttcccctacgactactctgccagtgagtaccgctggcacatcaacttcaccacgttcttcatcgactgcatggctgccctgggcctggcttacgaccggaaaaaagtttctaaggccgctgtcttagccaggattaagagaactggagatgggagccacaagagtagctgagttctgggcttctgagttcctgttccaaaagttttctgggcagagatttaatattctgttgattaactactggataatgctatcggaatgttaatgatgcatttaaactattccggtacagtattatgagaaagctttgatcatgttttgaggtaatgcatattttaattagccaggattaaccatgccacaatacatatatatttctaagcatacatgataaatgcatatacaattgtgcacatcagctttaaataataacgatgaatttgaacattctatacagagagtattaaagccaaggaacatgctgttttgatgctagggcaagcatggtgctctttccctgtttgcactgcatccagcttcgttccttcctctgtcatcaccatcttcaggcaaatagctgaccagccactggcctgtgtccaccttccaaagcccaggcaacctttctgctttctgaaatactgatccttcctcctggatatgtctttccttgttctgaactttgagattgctggctcagacttaagatagaacaaaaaccttcctggaagttcccactggtgaacttcactataggttttgccagagggaatagggaaattatcttgattgtagcaagtagatcaccttgagagaagaattagcacgcacggtgtggtttgtaagtaaggatgggagagagctaggaaaaggtggccatatctaatggcctacttaccaagcccccaggcctctctgcataggcatggagtccttccagtccatattctgaacaacagtttttagtgagatttgaataattaaattattttcagagtgaagggaatgggaaatgcatggtctgtgccaggggcggagagtggggaagggttagcttttggtaactgaagatttcttcaatggaaagactcttaatgttaaatgtgcctagaactggtaactaaacagctgacatttggagggaatgtggtgaaaactatgtaaatataagcaaaatccgcacatgaaaatatttcacttagaaaaagtgttgctaaagaaaaaaattcgaaggacaagaggtgttgcctgggttgccagtttctttcgtggcagggcaggaaatagtgaggttgagaggcagcatctgtaagtagatgctaagaggtacatttctaaatgaagcccttggggaacatctgccagggatctagagagtgctggtttcatccattgttttaatttcctccttggattgagtagaaacgtggcttcttgtggtgttgaaccttccccgacttctttgctttgttgccatctagcctgcccagcactgcctagggagcgcctacccaccctgatttcttctgccagctcctacccaccctgatttcttctgccacttctttctttggcattcatttttctttccctggacaggaagctagttacccgagtgtatcaggagcacctggcttgcctttgtccaggcccattcctcctggtatccttgggtgtggaactgctggacagcttcaggaagcagagccaggtgccacttttctgtggctccagatcctccctacctccacccctatgtgcctctgccacagtaatttcagaaaagcttggtacaccctctagcaacatcttggttcagagagtctctctggcttgtgagttaacagctcagccaaatgctgtgttgtctcagtgaggcaaccactgaacgagagggttggttgttgggctgtctctgttggagtcagagtagacaacatgttcacttcttcctgtctgctttgcaaggtgtctgtgactgatcaaggcaggcagggagtggtatagtacttctgaaaggaagaagttccctatttatctgttaaaagaccagaggcatgggcaagtgctcaggacctcacttcgggaagagggtctgcttcctgaaagccagtgtataaggaaaagcttcgactgaacctggtatctaaggtaccatgaactaacactctatcacacagcccagggcaaacagtggtatagaaaagtctagaagaaaacatcacatcagtattttagaaccatccacctttactgtccctgtagcccaatccagagcctggcttttagatctggctgcgtacagtgccaaatgctcagtttacttgtaagatcagagcctttctttctgtgttaattgaacacatgctctgagctgttttgttgaagtagaaaatctagtagaaaatcactgtagatctgatgacctggaaacctctggaaatgccttcgggtggttttatttttccaggtcacagatgcctgatttataagatgaacaatgaaatcagctttctttctcttctgatcttattccctggatttgatgcagcccatgttccaaagcaaagctacatagagacttcaggctgaggtcctggtgtctttaagcaaggacactctttcagatcctctcagaggcgtatttgtaacagtttccacatgaatgtactaatcatgttgggtgccttatcgctttcctaatctacagtgcctgttagcccagcctcactccttcccttaaccctgagatcccgtagatggagcgggtgtagacaagaggctggctggaggatcatcagtacagtgatttgcagaaatcttttatgggcttcattttggaaaaatttgtttttagtaaatgctcaaatttggtgggaagtaatttgaatgtatttgattgtattgtcctcattacaattgttaattagacacgttctacatgacagtagtactcaggggagttttctccctgggctgctaatatctgggtgtaatctctgaaactgtaggtccagtgaggcggcgtgaaaagttagcaaagccaccatctgctggtggtttaagccaaggcctctcttcttcgccactgacttgctatgttatcctttctcttgtaacaaacccatcccagagatgaggcctttaatcatcccaagaacctcctgggctaagtatctgacagtctcacatctcaacatcgtgtattaagtgtccagaacatcagctcaggaggacacgctgaaactctcactctgggcgagtcctgataaaacaggctcctaatactgacctacctcaagggcagttctgaggtgattagagccttttctttttttaagcaagtgtttggagatgcatggcagaggttttcctgcagacttgtaaagagctagatgtgttctaagaccatctttagtctacattgctcttcccagagatctacaactatgacccagccaaagtgcaagcctacctactcactgccataaaaactattcaggaaaccttttcctggcctgaatgagattttgttttttttttttttatgtggggcggttatttgtgacccaagtgtaatttggatgatttttaattaatatcaactcttgaagcctaatatgtactggatttgagattgcatttgttcctaataaaagtggatctagctgtgctgcctgg

SEQ ID NO: 1133 - DNA, 909 bp, Rattus norvegicus
tacagcatgggggatgctcccgactatgacagaagccagtggctgagtgagaagttcaaactgggcctggacttccccaatctgccctacttaattgatgggtcacacaagatcacccagagcaatgccatcctgcgctaccttggccggaagcacaacctttgtggggagacagaggaggagaggattcgtgtggacgttttggagaaccaggctatggacacccgcctacagttggccatggtctgctacagccctgactttgagagaaagaagccagagtacttagagggtctccctgagaagatgaagctttactccgaattcctgggcaagcagccatggtttgcagggaacaagattacgtatgtggattttcttgtttacgatgtccttgatcaacaccgtatatttgaacccaagtgcctggacgccttcccaaacctgaaggacttcgtggctcggtttgagggcctgaagaagatatctgactacatgaagagcggccgcttcctctccaagccaatctttgcaaagatggccttttggaacccaaagtagcaccacaaagtccagacctagggatactcatgagtgccctgctggctgtgggcctagagcatggctctggcgcccaccacatgcagctttctcctcctttccattccctgttcctccatctcctcttcccagcccttgcctcagtcaagcctcagttccctggtctctccatttcttcattagtcccctcccttgtctctgccctgcatccaacccttccctcactgattttcggaggactgtaccagacccctgaatccccagcctggcctgagagattagatctcactgtgctgccctggtccccaggaggacccattttatttgcaataaagtgtgaaccacaaa

SEQ ID NO: 1134 - DNA, 1927 bp, Rattus norvegicus
gaggaaacccggaattcagatggtggctgagggtggctgactgaaaaacggacttccagatttcttactcttccacaagggccctcatcacgtgcgcaggtctctaaccttactctctgaaaggatggcttgccttcttcctgctgctcgacttcctgcaggctttctcttcttagtgctctggggctcagttctaggtgacaagctgctggtggtcccccaggatggcagccactggcttagcatgaaggagatagtggagcacctcagtgaacgcggacacgacattgtggtgctagtgccagaagtcaatttgcttttgggagaatccaaatactacaggaggaaaagctttccggtcccctacaacctagaagagttacggacccgctatcgctcctttgggaacaaccactttgctgccagttcccccctgatggctcctctaagagagtacaggaacaacatgattgtcattgacatgtgctttttcagctgccagagcctcctgaaggactcggccaccctcagcttcctcagggagaaccagtttgatgctctgttcacagacccggccatgccctgtggtgtgatcctggctgagtatctcaagctgccttccatctacctcttcagaggtttcccatgctctctggagcacattggtcaaagcccaagccccgtatcctatgttcccagattctacaccaaattctcagaccacatgacatttccccaacggctggccaacttcattgctaacatcttggagaactacctttatcattgtctgtactcaaagtatgagatccttgcctcagacctcctcaagagagatgtgtccctacctgccttacaccagaactctctgtggctgttacggtatgattttgtgttcgaatacccccggccagtcatgcccaacatgatcttcattggagggaccaactgcaagaagaaggggaacctgtctcaggaatttgaagcctatgtcaacgcctccggagaacatggcatcgtggttttctctttgggatccatggtctcagagattccagagaagaaagcgatggaaatcgctgaggctttgggcagaattcctcagacgctcctgtggcgctacaccggaactagaccatcgaaccttgcaaagaacactattcttgtcaaatggctaccccaaaacgatctgcttggtcatccaaaggctcgggcgttcatcacacactccggttcccatggtatttatgaaggaatatgcaatggggttccaatggtgatgatgcccttgtttggtgatcagatggacaacgccaagcgcatggaaactcggggagctggggtgaccctgaatgtcctggaaatgactgccgatgatttggaaaacgcccttaaaactgtcatcaataacaagagttacaaggagaacatcatgcgcctctccagccttcacaaggaccgtcctatcgagcctctggacctggctgtgttctgggtggagtacgtgatgaggcacaagggggcgccacacctgcgccccgccgcccacgacctcacctggtaccagtaccactccttggacgtgattggctttctcctggccatcgtgttgacggtggtcttcattgtctataaaagttgtgcctatggctgccggaaatgctttgggggaaagggtcgagtgaagaaatcacacaaatccaagacccactgagaagtggcaggaagtgaaggagaagtattagtcccttatccaatcagttgaaacttggaaacaagtgttaaatccatgttgcttttattagggaaataattcaccatacactatacacccagaacatttttttttctttttctttttttcggagctggggaccgaacccagaacatcttctttttttaaataaaaacaacccaatcgccggcc

SEQ ID NO: 1135 - DNA, 1377 bp, Rattus norvegicus
gttcgggattcacacatacacttcagaatgccgggtctaagttgtagattttatcaacacaaatttcctgaggtcgaagatgtagtgatggtgaatgtaagatccattgctgaaatgggggcctatgtcagcttgttggaatataataacattgaaggcatgattcttcttagtgaattatccagacgacgtatccgttctataaacaaactgatccgaattggcagaaatgaatgtgtagttgtcattagagtggataaagaaaaaggatatatagatttgtcaaaaagaagagtttctccagaggaagcaatcaaatgtgaagacaaattcacaaaatccaaaactgtttatagcattcttcgccatgttgctgaggtattagagtataccaaggatgagcagctggaaagcctattccagaggactgcctgggtctttgatgacaagtacaagagacctggatatggtgcctatgatgcctttaagcatgcagtctcagacccatctatcttggatagtttagatttgaatgaagatgaaagagaagtactcattaacaatatcaataggcgtttgaccccacaagctgtcaagattcgagcagatattgaggtagcttgctatggttacgaaggcattgatgctgtaaaagaagccctgagagcaggtttgaattgttctacagaaaccatgcccatcaagattaatctaatagctccacccaggtatgtgatgacaacaacgaccctagagaggacagaaggactctctgttctcaatcaggctatggcagtcatcaaagaaaagattgaggagaagaggggagtgttcaatgttcagatggagcccaaagtggttacagatacagatgagactgaacttgcaaggcagctggaacggcttgagagagaaaatgcagaagtggatggagatgatgatgcagaagaaatggaagccaaagctgaagattaaccttttggaaaacagtccaatttaaggagtacgaagcagccctttctggctgtaaaccctagacttgaaagttttccagtattgaaaacttcaaagctgaatatttttatttccaagtatttaagtattcgacaagccagaatctaaatgccctccttcatgtcagctgttttcacatagtggctctaacacctcaagcgtttttaagggagtggcttgatttgaccagagacaaatgttaaaccgcagtcctaaaattgggcttgcggttttcatttctgatgtctctggattggcacccttatggtttagagaattaccaggggctccagacaccaacaatcccaacctttctatataaaatgtactcaagcaaacatcaaataaatttctgggatattt

SEQ ID NO: 1136 - DNA, 1856 bp, Rattus norvegicus
gtctccctgagaaggctgccatggatccagtcctagtcctggtgctcactctctcctctctgcttctcctctcactctggagacagagctttgggagagggaagctccctcctggtccaacacctctcccaatcattggaaacacccttcagatatatatgaaggacatcggccaatcaataaaaaagttttcaaaagtctacggccctatatttactctgtatttgggcatgaagccctttgtggtgttgcatgggtatgaagctgtgaaggaagctcttgttgatctaggagaggaattttctggaagaggcagttttccagtatctgaaagagttaacaagggccttggagtcatttttagcaatgggatgcaatggaaggagatccggcgtttctccatcatgaccctgaggacttttgggatgggcaagaggaccattgaggaccgtattcaagaggaggctcagtgccttgtggaggaactgaggaagagcaaaggtgccccttttgatcccacctttatcctgggctgtgctccctgcaatgtgatatgctccattattttccagaatcgctttgattataaagatccgacttttcttaacttgatgcacagatttaatgaaaacttcaggcttttcagctccccatggctacaggtctgcaatactttccctgccattattgattacttccctggaagtcataaccaagtacttaagaatttcttctatataaaaaactatgttttggagaaagtaaaagaacaccaagagtccttggacaaggacaatcctcgggacttcattgattgtttcttgaacaaaatggaacaggaaaagcacaatccgcagtctgagtttacccttgaaagcttggtggctactgtaactgacatgtttggagctggcacagaaacaacaagtaccactctgaggtatggactcctgctgctgctgaaacacgtggatgtcacagctaaagtccaggaagagatagaacgtgtaattggcagaaaccggagcccctgcatgaaagacaggagccagatgccctacacggatgctgtagtgcatgagatccagagatatattgaccttgtccccacaaacctgcctcatttagtgacacgtgatataaaattcagaaactacttcattcccaagggtaccaatgtgatagtatcgctgtcatccatactgcatgatgacaaagaatttcctaatccagagaagtttgaccctggtcactttctagatgagagaggtaactttaagaagagtgactactttatgccattctcagcaggaaagaggatatgtgcaggagaagccctggctcgcacggagctgtttttgttcttcaccaccattttacagaattttaacctgaagtctctggttgatgtaaaagacattgacacaacaccagctatcagtggatttggccatttgccccctttttacgaggcttgttttattcctgtgcaaagggcagactctctaagctctcatctgtaatgtctcttctgagggtcctgtctacttcattcttggtactatagtagctttaactcacatatccccatttccttcggatccagtgaacatcaaacctcattgagttgagttccctgagtcaatatatagttctattcctgttccctatatcttgtgacgttccctatatcttgtgacattcccatgcagtacttacatagttagtgctaatacttgtatgacttcattactgttaatactgttttcactatataaaagcaaaatattttagaatatgagaattcagagtcatctgttcccttcatgtgctaaataaatactaatttttggacc

SEQ ID NO: 1137 - DNA, 1501 bp, Rattus norvegicus
cagggtcgtcctggcaaccagctgctcagccaatcagcgcttgacactacgatccgcccccaacttctggagccatggcggtgagaagagccctgattgtattggcccacgcagagaggacatcattcaactatgccatgaaggaggctgctgtggaggctctgaagaagaaaggatgggaggtggtcgaatctgacctctatgctatgaactttaaccccctcatttccagaaacgacatcacaggggagccgaaggactcggagaactttcagtaccctgttgagtcatctctggcgtataaggaaggccgcctgagcccggatattgtagctgaacagaaaaagctggaagctgcagacctggtgatatttcagttcccattgtattggtttggggtgcccgccattctgaaaggctggtttgagagagtgcttgtagcaggattcgcctacacgtatgccaccatgtatgacaagggtcctttccagaataagaagaccttgctttccatcaccaccgggggcagcggctccatgtactctctgcagggtgtccacggggacatgaacgtcattctctggccaattcagagtggcattctgcgcttctgtggcttccaggtcttagaacctcaactggtgtacagcattggccacaccccacccgatgcccgcgtgcaggtcctggaagggtggaagaagcgtctggagactgtctgggaggagtcaccactctactttgctccaagcagcttgtttgacctaaacttccaggcaggattcttactgaaaaaagaggttcaagaggagcagaaaaagaacaagtttggcctttctgtgggccatcatttgggcaagtccattccagccgacaaccagatcaaagctagaaaataaggttttccataccatgtagttagacccaggtttctttttccccagcttgcctggcttgctttcagttttcgcctttgttccacaaggataggaaaaggaggaggctcgcctcatgcgtttttggatagttctgccacggcgtgtgacagcaaaatgaacgaggtcagattaggggcctcaggtggcctgggatatgaatcagggagaggtgtagccgcgagcggggaaaatactcttctaggtcttttgtacactataagcttttttcttcgggctagcctggctaaatggcatccaatcctccacccacttgttgctattagttacctctctgtggtttagggcaggagggaattgctcaaacaatggctgagggactaacttgtttagcagttagctaaagcctgtttatgatccatcctggtttcaattactgtgcagtgactgacaagcctcgggggattgctctccagctcttctctgccttgtacatagcacacccaggtcctgggaaatgaatacaaaaacaggtctccgcctcattcttgctattctttctttgtgtgtgtgtgtgtggaaataaatggatatttcacacgtca

SEQ ID NO: 1138 - DNA, 8377 bp, Rattus norvegicus
aagcttgcttctaatttccaaaatgttagagttggtttttctggagaatctcaggattaacaaaacaaagacacaaaaagtgaagtccttgttgagatcaaaagtcactttagagtaggagagatggccgggtggttcacagtacttgctgcccttacagaggacctgaattcagttccctacatgggcagctcactaccccctgtgactcccagtcatgggggacccaatgccctcttctttcttctcaggcatctatatgcacgtggcatgaatacatacatacatttacttgggtctacagacacacataaaataaataatatgttttcgttgttgttgtcttttccagacagggtttctctgtgtagccttggctgtcctggaactccctctgtagaccaagctggcctcaaactcacagagatgtgccagcctctgcctcctgggtgctaggctcaaaggcctgcctgtaccatcactacctggaaaacagtaaatactttttaaagaggtattttaagaagtaaatacttttaacaataacaaaaaaggacaactagaactacggaggctttgaagaaccacccagcatgtttgtgtattctctgtcctgtaccaaaggtccagctcgccaggaattcggagggtaattgtccaagtcctcccctctaagcttcggtgggttatctgccgttatagatgtgtcagagccatgtgtcctgacttcagtctccggtactcaggcaccaggaagtcacagtgtggcccaggttctaggagagcaccaaggaggcgccagaggtgggtgctgcactccatgagaccctgggcagaaagcttcatcctccagctcacattccccgcctgtaagactggagccatctatcccccactgtgacacatggggatgaaccttggaaaagtcagtctaggcaggtgttagtaaaacaaacaggactatgtacataaaggattgagaaaaccagtcatccttagagttccgggaaggtagactcaagtatgtagacttggggcccggatgggtcaatccctgggtttgcccaccagcatctcacagctagaattgtctcctagttctggaaccttccagattcctgagaggctggctactcctgccttcctatcactgaatagagtagagggttctggaaaggacccaaaaaattctgctaagaggcaattcactcagatttcctttttttttttttaagagcttgccagagtcatatgatttatccccatacaggccaggccgaccagcctcggggcggggtgttgcaacaacagccagaacgccggctcagctgggcggccaccacgtgactcgagtacttaaagggctggcgcgggcagctgctcgctcacagtcgccagtcgcctccagagtttccgcctccaaccagcgagtggagcctgccggagcagagccatctcgagcggagcccggagcctgaagcgagcggagccagcctgaactagcccagtcccgcgatggagcgcccacagctcgacaggcaagcgactacttggggacgggaactgtgatgtcccgcgtcccttgtccagcctagaaatgcaggctgcgggaccaaggaacgagttgccgcccagtctacctgtagccatgggcagctggagggagaaaatgtgattcacccctctgacacgctggaggtgaccggatgggtgtgtcttgtagtatccaggtttgagggatgaacagtgctgagtcctggatcctggactcaccgttctagggggcgggggttggggagcttggccctcttggtggcgcggagtggtcacatcaattcccaacttcagacgacttgtaagacgcagggaggcagccgtagcagaactagagggtgttgaggctgggtgttttttgtttggggatgggggggacaggaagttttttgtttgcttggtgttttgttctgttttgctttggggtccctgtgtagatcaagttggccttgaactccagttcgcttccctttgcttcctgagtactgagattgaaggtgccccgccaccacacttggcttctattcctcctcctcctcctcctcctccttctcctcttcctcctcttcctcttcctcttcttcctccttctcctcttcctccttctcctctttgattttttttgagacggagcgcctctttgtagccctggatgtcttcactctgtagatcaggctggcctagaactcggagatctgcctgcctctgcctccctagtgctgagattacaggcctgcaccactctgtccagctcttttttctttttttccttttataaagccagttttatttttatatttttatttaaagcgtctcgagttacatttaatttatcgtgcatgtagagtggccacatatatgacacactaaatatgtggaggtcagagttcgacttgaagaaagtcacttctcagtctaccatgtggcttccaagaaagattggcttatcaggtggcaagtgcgtttcctggctgagcttacactgtctagtcctcacctccaacttttagcagtaaggattgaacttaggacttcaaacattctaggcaagcgctttacccataaggtacagtatcagcaccttttttatttaaagacagtgcctaactaagttgaccaggctggtctggaactcttgaatcttctgctgcagaacctctctaaataaagctgggttacatagactatttaatgcagaaactttgagtatagtgtatagttggttttggatgggttttttgtttgttttttgttttgttttgctgagactcttcctacatagccctgtgctgaaattcattcactatatagatagacccaggttggctttaaactaagagatctgcctacctccacctcctgcatgctggaattaaaggtgtgcaccatcacgtcctgctgcttgtaaaatctgtaactgaaattttttaagaaatatcttcaggttggatctaaaagctcaccaaagtatctacccttagccgggctgtggtggcccatgtctttaatcccagcactcaggaggcagagggaagcacatctctagagttctgggccagcctgctctacagagtgagatccaggacagccagggctacacagagaaacgctgtcttggaaagagaaaatctgcccttgagtatggtccttggactggcgtggctcttccctgaggtcaggacataccttgcctcctcttcactgggaataactggcgtaggaatcctccctggggttttggggactacgtcacatagtgtttaatgactgacatctgtttgcatggttaagatcatggcttggcctacattggaggctggagctattctgcaggtctaatcattcataggcatccccggctgactctcctctcttcctccacagcatgtcccaggatttgtccgaggccttgaaggaggccaccaaggaggtgcacatccgtgcagagaattctgagttcatgaggaactttcagaagggtcaggtgtccagggaaggctttaaggtacgtgacgtgtaggttgaccagaccactggggtatagcaggtatacccagggcttaagccaatagtttaatggggaggttggtgccaggagtgatgagggcctgtccaaggacgccatcttggtaatgctgaccctgtagctcagagaggaaagggtctgctggtggaggagctggtgcagtggggtggttaagtgaacacgtattctatgttggtcattttatgttcttgaggagtgcctaaggagaaggaacagagaggttaaagaggccatcctgtcagctttcagtggaaaagaccaaaaccaaagatggccaaatttcagagcttgcgctcttgacctggttaccgcagggcctcatacatgccggctaggttctctaccactgacccacaatccaagctcttaggttactagatcgggtctcactacacagttcaggaactctcaatactcctgcgtcagcctcccgggtatttggaccatgggagacccaaatctcctgacccaatttcaacttgcctctgaaggaaaggagaagtttgccttagccctgcagtgtcctgttcccacagtgagattggctacctcatttaacctcccaagccctcttgcctgaggaatggggttttgacagctgggctgaaatgcacagtagacacaatagaccctgtttcctgccagctgtggaactgatgtctgcagcaaacatcagacacagggaagagagcactgactgggtggggagtggagggtggtggagacaggagaccgtccttccagaagggttcttctagcgacaagttgattctgtttttttcagctggtgatggcctccttgtaccatatctatacggccctggaagaggagatagagcgaaacaagcagaacccagtctatgccccgctctacttccctgaggagctgcaccgaagggctgccctagagcaggacatggccttctggtatgggccccactggcaggaggccatcccttacacaccagccacacagcactacgtaaagcgtctccacgaggtgggaggtactcatcctgagctgctggtggcccacgcatatacccgctacctgggtgacctctcagggggtcaggtcctgaagaagattgcgcagaaggccatggccttgccaagctctggggaaggcctggcttttttcaccttcccgagcatcgacaaccccaccaagttcaaacagctctatcgtgctcgcatgaacactctggagatgacccccgaggtcaagcacagggtgacagaagaggctaagaccgccttcctgctcaacattgaggtgagccccactgttccttcaagccccattcattccagttattggaggaagggtccccagagtcccagttagtacaaggacttggggccagccagggtcctgttttgctgcttaactagctgggtgattgtgggcaaatctcttcatcctcaggttctaaatctccaaaatagggataataatagcatccatcttcaaggcgagaggggcaagcaagttgtggttcagtccctgtgggaggagtgatacaggggaagttccctgatgtcattgctctcttgtgtggtgggctgtgatcctctgacaatggtgtagctggacctggggtgcctgagtactggtgcatggccaggccagcacagtccaggcttcggatgctgacatgtcccaggtggcatttgcttccttttctttgatttgcattgatgtgttgcccacgggtatatctgtttggtgtcagattcgttgggggtggagctacagacagctgggagctgccacaggggaaccgggaattgaacccgcatcctctggagagcaactaacgctcttaatctttgaactatctttagctcggtgttttgagcaaggccccgaaaggcagagctgggggagtagactgtcctatttatactatgggtgctatggtggtcagggttccaatttgggacctcctgtctctccccactttcagcctgagagcctttaaaagttccaccaggcaagcacctgttagagaagtaaccttcagatgtcctaaattcatctaggcccgttcacctgaggccttccgaggacatgatataaagaatgagtttagaagtggggaagtgatggcccattcctttaatctcagcactcagaaggcagagacaggaggatctctgtgagttccaggtcagcttggtctacacagctagttctaggacagccgaggctacacaaagaaaccctgtcttgaaaaacaaaacaaaacaccaacaagaaaagaggattagacacaggcccagctgagaactgggtctccatcctgacccctagtcgatctcaagaaagccctgctccaggagctgtggttccctgacctgcaaaagcagcgaccatactccattacacgacacaccgcctagcaaggaggagctcaagtacagtcatgaagagagcacgggatgtaggctgcacggctcccacacattcgtgtgttatttccgaagaggcaaactggttctcctcatagggatacagaaaagctcctgaagtctttattcagggcagccgttactggtggggtccaagcgagggtacagacagtatcggggacgcacaggcagggagccaactaaacctgtcacatctcatgagataagtgaaagacgcggtatgcgatagtttcctcaagtcgtgtcatttgtacaatatttcccaacaggcttcaagctgtgccttcccctgggtccccccacattgtgagtatcactaacaggcagtgtgtcttgtcttgtcttcagctgtttgaggagctgcaggcactgctgacagaggaacacaaagaccagagtccctcacagacagagtttcttcgccagaggcctgctagcctggttcaaggtaaagatggcctcttggcttctgctctccttagcccagctggaatttctttactcttctccattctgaacgttttaaattagagatagggtgcagacaaaagagcccagggtaagtctgtagtatgactgtgggtaagctatcagacttttctaccttagtttctccacattagaaaatcaggaggttgggggctgtgtagctcgttggctgaggggcatataaagccctcagaagtcactggcacagagatcctctcatttagatcccgcctcccacttcttttcccccaaggcagagccatgctgcatgacccaggctggtctcaaaccctgggagtcaaacaatcctcctgcttcaatctttcataaaaatctagggtgtgtttaccttttgaggcccactcaaggctcccatgcaggccccatatgaggcaaggatttgggaagctatttctagcgctgaccctccaggagacacgacggagttcatgtaattactggagtgtcagcccttttcctgtgccttgatacactacccttggagcaggagtaagggttcttaaaaagaccaaagtggcagaaaatgtgccttccctgagcctatcacccctgggacagtatggcccagggagtgggtgactgaaactgagcagggcaggttacgtgaagcttgattgcttgaatgggcccaccttttgcccaaggctctcccaagggaggcaggacccgccaccttgtcattagtggtactgtttctggtgggctgaaatatggtcagtgctgatagaattagttacctgtttgggtctggagtctttgacctgctgcggcctggcggagcacaggaggaacagcgtgggggagttggtgagctcctatctttgaaggtgtttaagcagtggctagtggttcaagctgtagcagaatcctggccttggactggaactgtagcagacacggcaccgagtgtcctctgctctgtgcagtgtcatccaccccaggctgtgtgtttgaccttgtctgtgtttctcctacagatactacctctgcagagacgccccgaggaaaatcccagatcagcactagttcatcccagacaccgctcctgcgatgggtcctcacactcagtttcctgttggcgaccgtggcagtgggaatttatgccatgtaaatgcagtgttggcccccagaggctgtgaactctgtctcatgtagccttctctctgcaggggagaatcttgcctggctctcttttcttgggcctctaagaaagcttttggggttcctcgcccccttcctgtgtcttcctttgtctctctggaatggaaggagatgcctggcacatttccctcaccaaaagcacagccaggggcctgaacttggaaaccagcagccccaaatcctgcaacagagccccagaactgtggtcggtagaggcggctgttctgagcccagtgcccttggtagtcggcgtccatgttgactgaccatgactgctttcccccagcgtcatggccactttgatatcagtgtgcagagattttctgtcttgtgtttctgtcttgtttttgttatttccccagttctaccagtgtaatggtattttttgttgtatcgattgtttttttattctaaccaagtagggctgtcttttgaggggtgggtggtatttaataattgtaaccttggtctctaacttctgtgtgaaataataaatggcattatctaataatcaccggaagttcgttcatgtctctgccgtccacgaacagggccctgctcctcctgtctcttcagtgtctggcaggaggagggcaggtggtggtggcatcagtagctttgacggtccactgtgtctgagagttggaagtgagcttcaagcatttgggc

SEQ ID NO: 1139 - DNA, 1580 bp, Rattus norvegicus
ctaatcggtgggacgcacctccgcgatgcatcggctgcaggtagtgctgggccacctggccggccggtccgagtcgagctccgcgctgcaagccgcgccctgctctgcgggcttcccgcaggcctcggcctccgacgtggtggtggtgcacggacagcgcacccccatcggccgcgccggccgcggcggcttcaaggacaccacccccgacgagcttctgtcggccgtgttgaccgcggttctccaggatgtgaagccaaagcctgagtgtctgggagacatctccgtgggcaatgtgcttcagcccggggccggagccgcaatggcacgcatcgcccagttcctgagtggcatcccagagaccgtgcctctgtcagcagtcaacagacagtgttcatcgggactgcaggcagtggccaacattgctggtggcatcagaaatgggtcttacgacattggcatggcctgtggggtggagtccatgaccctgtctgagagaggcaaccctgggaatatttcctcccgtcttctggagaacgagaaggccagagactgcctgattcctatggggataacctcggagaatgtggctgagcggtttggcatctcacggcagaagcaggatgccttcgcgctggcctctcagcagaaggcagcaagcgcccagagcaaaggctgcttccgtgctgagatcgtgcctgtgacaaccactgtcctcgatgacaagggtgacaggaaaaccatcaccgtgtctcaggatgagggtgtccgccccagcaccaccatggagggcctggccaagctgaagcctgccttcaaggatggaggctctaccacggctggaaactccagtcaggtgagtgatggagcagccgccgtcctgctggcccggaggtccaaggctgaagaactgggcctccccatccttggcgtcctgaggtcctatgcagtggtcggggtccctcctgacatcatgggcatcggacctgcctatgccatccctgcggccttgcagaaagcagggctgactgtgaatgacatagacatctttgagatcaatgaggcctttgcaagtcaggccctctactgtgtggagaagctgggaattcctgcagaaaaggtgaaccccctggggggtgcaatagccctgggccaccccctgggctgcaccggagcaaggcaggtggtcacgctgctcaatgagctgaagcgccgaggcagacgggcttatggcgtggtgtccatgtgcatcgggactgggatgggagccgctgctgtctttgaataccctgggaactgaggccctgactgcaggcactacccagagagtcctatagtagtgtctggagagggatggtacagaagccatcttcgtgggacactcagcagtggagggatttgtcacagcactttaatttagaaaatgtaatcgcaatacgggcacaagggcatccaatccactcctctcagttgaaccaaagacagcgcacgtcacacgtgaccacaggacaacatgtttctgagggacagtggcctcatgaatagtgggcatgaggggcatagtaaatgtatgttatctc

SEQ ID NO: 1140 - DNA, 3741 bp, Rattus norvegicus
acacgggtcgttgctttggtgtctgtcacttctgtcgccacctcctctgccaacaccaacactgacctccgtcatgaaccccgacctgcgcaaggagcgggcctccgccaccttcaatccggagttgatcacgcacatcttggatggcagtccggagaatacccggcgccgtcgagaaattgagaacttgattctgaacgacccagacttccagcatgaggactataacttcctcactcgaagccagcgttatgaggtggctgttaagaagagtgccaccatggtgaagaagatgagggaatatggcatctcggaccctgaagaaatcatgtggtttaaaaaactatatttggccaattttgtggaacctgttggcctcaattactccatgtttattcctaccttgctgaatcagggcaccactgctcagcaggagaaatggatgcgcccgtcccaagaactccagataattggcacctacgcccagacggagatgggccacggaactcatcttcgaggcttggaaaccactgccacatatgaccccaagacccaagagttcattctcaacagccctactgtgacttccattaagtggtggcctgggggacttgggaaaacttccaatcacgcaatagttctggctcagctcatcactcaaggagagtgctacgggttacatgcctttgttgtccctatccgtgaaattgggacccacaagcccttgccaggcatcactgtcggggatatcggtcccaaatttggttatgaagagatggataacggctacctgaagatggacaattaccgtattcccagagagaacatgctgatgaaatacgcccaggtgaagcctgatggcacatatgtaaagcctttgagtaacaagctgacgtatgggaccatggtttttgtgaggtccttcctcgtgggaaatgcagctcagagtctgtccaaggcttgcacaatcgccatacgatacagcgctgtgaggcgccagtctgaaatcaagcaaagcgaaccagaaccacagattttggattttcaaacccagcagtataaactcttcccgctcctggccactgcctatgccttccacttcgtaggaaggtacatgaaggagacctaccttcgaattaatgagagcattggccaaggggacctgagtgaactgcctgagcttcacgccctcactgctgggctgaaggcttttactacttggacagccaatgctggcatcgaagaatgtcgaatggcctgcggcgggcacggctattctcacagcagtgggattccaaatatttacgtcacttttaccccggcctgcaccttcgagggagagaacactgttatgatgctgcagacagccaggttcttgatgaaaatctatgaccaggtgcggtcggggaagttggtgggtggtatggtgtcatacctgaatgacctgccgagtcagcggatccagccacagcaggtggcagtctggccaactatggtggacatcaacagcctggagggcctgacagaagcctacaagcttcgtgcagccagattggtagaaatcgctgcaaaaaaccttcagactcacgtgagtcacaggaagagcaaggaagtagcatggaacctaacctctgtcgaccttgttcgggcaagtgaggcgcattgccactacgtggtcgttaaggtcttctcagacaaactccccaagattcaagacaaagccgtccaagctgtgctgaggaacctgtgtctcttgtattctctctatgggatcagccagaaaggaggggactttcttgaggggagcatcatcacaggggctcagctgtcacaagtaaacgctcggatcctggagctgctcaccctgatccgccccaatgctgttgctctggtggatgcctttgactttaaggacatgacacttggctctgttcttggccgctatgatggaaatgtgtatgaaaacttgtttgagtgggccaagaaatccccactgaacaaaacagaggtccatgaatcttaccacaagcacttgaagcccctgcagtccaagctttgaagtttccctgggacacgtctgagctccacaagcagcagaaactctctcctctactcactaatccttgtgaaatcgtcatcaaatttgtgtagctacagagcaaatgatgggtttcttttcctccctataagtaaagagaaatgaacagactttagagattaaatgagaaattcggtgttgtaagtgcagtaatgcagacagagacgtaggaactcagaaagcttcagagctgtggtctgacttgcatttgtactgctgctaatctcagtaggccttgactctggagaattaacagagttttaactacaaatacttacttattttcacatttttactgctaatcactggatatatgttttttaaacaaaagtgttatatagagtggaattttccaggcattcgtgcctaccactttctgatctactgctaagagcaggagtttgggggccagaaactaatagaaaccttgatgtgggtgtgtggctgtcacacaggccgctgctgcctgccatgtgggtgtgtcacccctattaactgtcacattaacatagtcaacaagaggactccttcaacacccacccaccaagaaaccagagttcccgatgggcacaagcacccactccaggctcagccttcgtggtagtggcactactgtgcctttgaccccactttttgacacagttaagttacttgtcttacctccaggctttcagccattgcctggatttcagtcatggtggctgaccttccctttcttgcttgccttccttctcctgaaagagataaaagagatagtagtcagcctctcctcatagattaagtatatggagagccctcagctatggtattactgtattttggtgactttgttaagtaaatttcctgggacaatcctgatttgaaagattctgtattctgttgcacaagctattaaaatgctcagtggtcaccaaagtatttcacacacacacactcacaaatcactcaggtcaccttttacactagaaataacaggaaagccctggccacagccatctgctgagagtgttagttgagatgtttcgttgaagatggctgaagaaagtgcaggccctggggagtttctccttgctgagagccggctctgtggtgagcccctagcagccttacgaggcggtgaaacggccccttcagatgggagcagcctctacaatcattctgagcttaaaggtgaaatatgcaccttttgtcctataaatgtcctataaatgcttggggggaggggtaatgttttgttttttttttcttgaaacagagcccagaatggccttgaactctgatcctcacagcctggtaaatgctgggcctacaggtgtgcgccgacatgtctggctgatcggagctctttattcttaaaagcacagtagggagatgattgtaacattaagtctgtgtctgtggcattcgcattgtgagagcagttccttagaacagttctgagagcacagcatcaatgtagtgaaaacgatgtcgacgcctgacatgaaatcacaaccctccgggtcatcgacacaagccttaacctttctcctggaatgactggtaatcccttaagattgacagtacacagcatgtcaccttgttggggtttctattgacagtaattcatattctggaaaggaactaataaatataaatgaccg

SEQ ID NO: 1141 - DNA, 666 bp, Rattus norvegicus
ctcacgaccgacatcgacctcctttctcattgcaccatggcggacgcctttgtcggtacctggaagctagtggacagcaagaattttgatgactacatgaagtcactcggtgtgggctttgccaccagacaggtggctagcatgaccaagccgaccacaatcattgagaagaatggggataccatcaccataaagacacacagtaccttcaagaacacagagatcagctttcagctgggagtagagtttgacgaggtcacagcagatgacaggaaggtcaagtcggtcgtgacactggacggaggcaaactggtccatgtgcagaagtgggacgggcaggagactacgcttacacgggaactaagtgatgggaaactcatcctgactctcacccatggcaatgtggtgagcactcggacttacgagaaggaggcgtgacctggctgccccgtcactgactgctcctctgccaatggctacccctaactcagcaccacgttgcctcatgtttctcccctctgacgttttatataaatactctttggttgggcttttcctggagatatgggacaccagcctggacccaggtcccattgtgtatgtggtttattttttaaatgtatccaaagggtgctccaaggtcaataaagcagagccaaggccacc

SEQ ID NO: 1142 - DNA, 900 bp, Rattus norvegicus
cgcgagcccagtggagcgagtgagctatggccggcctcaactcactggaggcggtgaagcgcaagatccaggccctgcagcagcaggcggacgacgcagaggaccgtgcgcagggcctgcagcgcgagctggatggcgagcgcgaacggcgcgagaaagctgaaggagatgcggccgctctcaaccgtcgcatccagctggtggaggaagagctggaccgggctcaggagcgactggccacagccctgcagaagctggaggaggcagagaaggctgctgacgagagtgagagaggcatgaaggtgatagagaaccgagccatgaaagacgaggagaagatggagatccaggagatgcagctcaaagaagccaagcacatcgctgaggaggctgaccggaagtatgaggaggttgctcgtaagttggtcatcctggagggtgagctggagagagcagaggagcgggcggaggtgtctgaactaaagagtagcgacctggaagaggagctcaagaacgtaactaacaatctgaaatcactggaggctgcttctgaaaagtactctgaaaaggaggataaatatgaagaagaaatcaagcttctgtctgacaaactgaaagaggctgagacccgagctgagtttgcggaaaggacagtttctaaactggagaagacaatcgatgacctggaagaaaaacttgcccaggccaaagaagagaacgtgggcttgcatcagacactggaccagacactaaacgaacttaactgtatataaaccaaaccagaagagtcctgtcttgataccaactccactccagagagtgcaccctgtcttcctctcttataagaagttccgcttactaccatgtctccaccttgctggaaaggccaagcagaaaaat

SEQ ID NO: 1143 - DNA, 1866 bp, Rattus norvegicus
agagccaacagagcaggaaggcatcatggcagcagcgctccgcagaggctacaaggtcctgagaagtgtctctcattttgagtgtcgagcacaacacacaaaaccatctctcaagcaggagccgggactagggtttagcttcgagttgacggagcagcagaaagagtttcaaacaattgctcggaagtttgccagagaggaaataatcccggtcgccccagactacgataaaagcggggaatacccgttccctctcatcaagagagcctgggaacttgggttgatcaacacacacattccggagagttgtggtggtcttggcctgggaacttttgatgcgtgtttaattacggaagagttggcatatgggtgtacaggggtgcagactgctattgaagcaaattctttggggcaaatgcctgtgattattgctggaaatgatcaacagaagaagaagtatttggggaggatgacggagcagccgatgatgtgtgcctactgcgtgacagaaccctcagcaggctctgatgtggcgggcattaagaccaaagcagagaagaagggtgatgaatatgtcatcaatggccagaagatgtggataaccaacgggggaaaggccaactggtattttgtattgacgcgatctaacccagatcctaaagtacctgctagtaaagccttcaccggattcatcgtggaggccgacaccccgggaatacacatcggaaaaaaggaactaaacatgggtcagcggtgctctgacaccagaggaatcaccttcgaagatgtcagagtgcctaaggaaaatgtgttaattggtgaaggagcaggtttcaagattgcaatgggggcttttgatagaaccaggccgacggtcgcagctggtgctgtcgggctagcccagagagccctggacgaagctactaagtatgccctggacaggaaaacatttggaaagctgctagtggagcaccaaggagtttcatttctgctcgcagaaatggcgatgaaagttgaactggccagactcagttaccagcgagcagcctgggaggttgactccggccgccggaacacgtactttgcctctattgcgaaggcctttgctggagatattgccaaccagctcgctaccgatgctgtgcagattttcggaggctatggattcaacactgagtacccagtagaaaagctgatgcgggacgccaagatctatcagatttacgaaggtactgcacaaattcagaggctgatcatagctcgtgagcacattgaaaagtataaaaattaacagaaattactatcgaacgatgcttcaccctcatgtaactacgctcagagcactgttgctgcttcagggggaaagggctttacttgtcttcccacagaaatgagataaaagacgcgtgtcacagatctgtgcaatggggtcccacggcggagggtgcctctgttgagttccacagtgaccctttctagataggtttggttttggacagtgagtggtcagtccttggccccgaattgtgttaatttgctccttgatcacttgagatggagaaataccctggagttctaatgctcattcaagtgacaagaaaggtagcctgtcacgaaagaactcaggattctacacagacactgaggaatgtggcggattggacccatcacactgtgaagagagagcatttctgtgctgagctgtttcataattttgattatatttcccttgtattgcagaagagtaaaaaagtttatatgcattttctcccattataaaactaaaaactttctggaaaatcttaattctgaactggcattttatttgtcttgattacaatgattcaataaagctagccttaactt

SEQ ID NO: 1144 - DNA, 1055 bp, Rattus norvegicus
gctgaagcaaattgagaagaccacagcgccagaaccatgcctatgatactgggatactggaacgtccgcgggctgacacacccgatccgcctgctcctggaatacacagactcaagctatgaggagaagagatacgccatgggcgacgctcccgactatgacagaagccagtggctgaatgagaagttcaaactgggcctggacttccccaatctgccctacttaattgatggatcgcgcaagattacccagagcaatgccataatgcgctaccttgcccgcaagcaccacctgtgtggagagacagaggaggagcggattcgtgcagacattgtggagaaccaggtcatggacaaccgcatgcagctcatcatgctttgttacaaccccgactttgagaagcagaagccagagttcttgaagaccatccctgagaagatgaagctctactctgagttcctgggcaagcgaccatggtttgcaggggacaaggtcacctatgtggatttccttgcttatgacattcttgaccagtaccacatttttgagcccaagtgcctggacgccttcccaaacctgaaggacttcctggcccgctttgagggcctgaagaagatctctgcctacatgaagagcagccgctacctctcaacacctatattttcgaagttggcccaatggagtaacaagtaggcccttgctacactggcactcacagggaggacctgtccacattggatcctgcaggcaccctggccttctgcactgtggttctctctccttcctgctcccttctccagctttgtcagccccatctcctcaacctcaccccagtcatgcccacatagtcttcattctccccactttctttcatagtggtccccttctttattgacaccttaacacaacctcacagtccttttctgtgatttgaggtctgccctgaactcagtctccctagacttaccccaaatgtaacactgtctcagtgccagcctgttcctggtgggggagctgccccaggcctgtctcatctttaataaagcctgaaacac

SEQ ID NO: 1145 - DNA, 1639 bp, Rattus norvegicus
tccgcggccaagatctggaggccgagccgtggcctgcgccaggctgccctcttgctgttggggcgacctggggctcggggcttggctagattccaccccagcaggcagcagcaacagcagttcccatccctggatgacaagccccagttcccaggggcctctgcagagtttgtagacaagcttgagttcatccagcccaatgtcatctccggcatccccatctaccgcgtcatggaccgacagggccagatcatcaaccccagtgaagatccccacctgccccaggaggaggtcctgaagttgtacaggagcatgacgctgctcaacaccatggaccgcattctctatgagtcccagcgacagggccggatctccttctacatgaccaactatggcgaggaggggacacatgtggggagtgccgctgccctggagcgaacggacctggtgtttggccagtaccgggaggcaggtgtgctcatgtaccgggactacccgctggagctgttcatggcccagtgctacggcaacgtgagtgacccaggcaagggacgccagatgcccgttcactacggctgcaaggagcgtcacttcgtcaccatttcctctccactggctacgcagatccctcaggcggtaggggcagcctatgctgccaagcgggccaatgccaatcagatcgtgatctgttactttggcgagggggcagccagtgaaggggatgcccacgccggtttcaattttgctgccaccttggagtgtcctatcatcttcttctgccggaacaatggctatgccatctccacaccaacctctgagcagtaccgtggggatggcatagcggctcggggccctgggtatggcatcatgtcaatccgtgtggacggcaacgatgtgtttgcggtgtacaatgccactaaggaggcccgacggcgggctgtggctgagaaccagcccttcctcattgaggccatgacctacaggatcgggcaccacagcaccagtgacgacagctctgcgtaccgttcggtggatgaggtcaattactgggacaagcaggaccacccgatctcgagactgaggcagtacctgctgaaccagggttggtgggatgaggaacaggagaaggcctggcggaagcagtcacgaaagaaggtgatggaggcctttgaacaggctgagcggaagctaaagcccaacccaagcctcctcttctccgatgtgtaccaggagatgcctgcccagctgcgcaggcagcaggagtccctggctcggcacctgcagacctacggggagcactaccccctggaccactttgacaagtgaggccctaaccaccacaaggtgtcctgctctgagtggagctggggggcggcaggacgctgccccccgctgctaaccagtgctgctgacgtgctgagcagccagtgtggcacgcactgcggctcccccaggctacttcactggggcaccacatttgcagccattgctgcagctccatcactcccttcacctgttacagtgccttttaggggtggggaggaaccagggccagggcagaccctttggcagggtggccctggatttgctcagagaaatagctgattggcagagtaagtaaaccacagctctgcctttg

SEQ ID NO: 1146 - DNA, 948 bp, Rattus norvegicus
aacagctagcggagcggcaggaggagcactaaccaggaaaatggcagacggcttctcacttaatgatgccttagctggctctggaaacccaaaccctcgaggatggcctggtgcatgggggaaccagcctggggcaggaggctacccaggggcctcctatcctggggcctacccaggacaggctcctccagggggttatcctggacaggctcctcctagtgcctatccgggcccaactggccctagtgcttatcctggcccaactgcccctggagcttatcctggcccaactgcccccggagccttcccagggcaacctgggggacctggagcctaccccagtgctcctggggcctaccccagtgctcctggggcctatcctgctactggcccctttggtgccccgactggaccactgacagtgccctacgatatgcccttgcctggaggagtcatgcctcgcatgctgatcacaatcataggcacagtgaagcccaacgcaaacagtatcactctgaatttcaagaaagggaacgacatcgccttccactttaacccccgcttcaatgagaacaacagaagagtcatcgtgtgcaacacgaagcaggacaataactggggaagggaagaaagacagtcagctttcccctttgagagcggcaaaccattcaaaatacaggtcctggttgaagccgaccacttcaaggttgcggtcaatgatgttcatctgttgcagtataaccatcggatgaagaacctcagggaaatcagccaactggggatcattggtgacataaccctcaccagcgcttcccacgccatgatctaagccagaaggggtgggccggcaccagaactgccctgtgtgttatgagcgggaaactttgcatttctctctccttatacttcttgtaagacatccatttaataaagtctcgtgctgagaga

SEQ ID NO: 1147 - DNA, 1671 bp, Rattus norvegicus
cctttctttgcgagaagtgcaaaattggctagagccagagtctcgcccacctggtacagaaggagcgcgcgcctgtgtcccttggggacccacagttgcaaagagacagctgcttgatttggtcacccactcgcccagactataggagcctcccgggacactcttgagttgcacctttctgcagagcagactgtttgagcccccgcagtgctcgtaggatttgaagcgttctgatactggaggcttgctcgccgcgctcgcccgactctgggacacatttgtccgagccacaggagtgtgcgggtgactgacatatcatctcttcgactctccatgagctcatgaacctgggagcaggtgcccggaaatggcgcggcctctgagcgacaggaccccgggccccctgctgctgggtggcccggctggggccccccctggcgggggagcgctgcttgggctgaggagccttctgcagggaaacagcaagcccaaagaaccggccagctgtctcctgaaggaaaaggagcgcaaggcaactctgccctcagcccccgtcccgggacccgtcctggaaacggcgggcccagcggatgccccaactggggcggttagtggcggtgggtcccctcgggggcgctcagggcctgtggctggcccgagtctttttgcgccgctgctgtgggaacgcactttgcctttcggggacgtggaatacgtggacctggacgccttcttgctggagcacgggctaccgccgagcccgccgccccccgggggcctgtcgccggcaccctctccagcgcgcactcccgcgccctcccccgggcccggctcttgcagctcctcttccccccgctcctcgcccgggcacgcccccgcgcgggccactctgggagccgccggcggccaccgcgcaggcttgacctctagggacacacccagtcctgtggacccagacaccgtggaggtgctaatgacctttgaacctgatccggctgatcttgccctgtcaagcattccaggccatgagacttttgaccctcggaggcaccgcttctcagaggaggaattgaagcctcagccaatcatgaagaaggcaaggaaagtccaggtgcccgaggaacagaaggatgagaagtactggagccggaggtacaagaacaatgaagcagccaagaggtcgagagacgcaagaagactcaaggagaaccagatatctgtgcgggcagccttcctggagaaggaaaacgccctattgcggcaggaggtggtggctgtgcggcaggagctgtcccactaccgtgctgtgctttcacgctaccaggcccaacacgggacactgtgaggccacttccaccctgccagggcagagtcctgttccttgttcagacttacacctgacaccccccttcctccttgtcccatggccaatggtctggccagctaggtgcccaggaacgtcatgatgcagacaaatacatttatatttttaagaaaaagctagccttcccccacctcccttgtgggggtggggagggtcctgtgtgcacttttagcatgtcgaggaacccatccatccaaccgcctccatcaacacaatcctgaataaatcttgagaacccaaaaaaaaaaaaaaaaaaaaaaaaaaaaaaaaaaaaaaaaaaagaattc

SEQ ID NO: 1148 - DNA, 2052 bp, Rattus norvegicus
cgggacactttgcagacatggagactgtcgttcgcagatgcccattcttatcccgagtccctcaggcctttctgcagaaggcagggaaatctctgctgttctatgctcaaaactgccccaagatgatggaagtcggggccaagccggctcctcggaccgtgtccacttcagcagcacagtgccagcaggtcaaagaaacccctccagccaatgagaaagagaaaactgccaaagccgcagtccagcaggctcctgacgagtcccagatggcacagactccagacggcacacagctcccgcctggacacccgtcaccctctacaagccagagctctgggagcaagtgccctttcctggcagcacagctagccagacgggcagcagcgtcttccgcaaggccagtctggagcttcaggaggacgtggcaggaaatgcatgctgtgaggacagaggttgctcaaagcccagtgctccccagcttggtcaatgcaaaaagggatggagaaggtccaagcccactgctgaagaacttccaggacatcatgagaaagcaaaggccagaaagagtgtctcatcttcttcaggataacttgcccaaagtcgtttccacttttcaatatgatcatttctttgagaagaaaattgacgagaaaaaaaatgaccacacctaccgagtttttaaaactgtgaaccggagagcacagatctttcccatggcagatgactacacggactccctcatcaccaataatcaggtgtcggtctggtcgagtaacgactatctaggcatgagtcgacacccacgggtgtgtggggccgtcatagagactgtgaaacagcatggtgccggtgcaggtggaactagaaatatttctggaacgagcaagttccatgtggaactggagcaggagctggctgacctccacggcaaggacgcggcgctcttgttctcttcctgcttcgtggccaacgactccactctcttcaccctggctaagatgatgccaggctgtgaaatttactctgattccgggaaccatgcctccatgatccaagggattcgcaacagtcgagtgccaaagtatatcttccgccacaatgatgtcaaccatctcagagaactgttgcagagatccgacccctcggtccccaagatcgtagcattcgaaactgtccattcaatggatggagcagtgtgccccctggaagagctgtgtgatgtggcccatgagtttggagcgatcacgtttgtggacgaggtccatgcagtagggctctatggggcttcaggtggagggatcggtgatcgggatggagtcatgccaaaaatggacatcatttctggaacactcggtaaagcgttcggctgtgttggaggatacattgccagcacgagtttgctgatcgacaccgtccggtcctacgctgcgggcttcatcttcaccacctccctgccaccaatgctgctggctggagccctggagtctgtgcggatcctgaagagcaatgagggacgtgcccttcgccgccagcaccagcgcaatgtcaagcttatgaggcagatgctaatggacgctggcctcccagtcatccactgccccagccacatcatccctgtgcgggttgccgatgctgctaaaaacacagaaatctgtgatgagttgatgaccaggcataatatctacgtccaggccattaattacccaacagtgcctcgtggggaggagctcctccggatcgcccccaccccgcaccacacaccgcagatgatgaactacttcctagagaagctgctgctcacgtggaagcgagtcgggctggaactgaagccacattcgtcagctgaatgcaacttctgcaggaggcccttacacttcgaagtgatgagcgagagagagaaagcctatttctcaggcatgagcaagatggtgtctgcccaggcctgactgtgactcagttattcacaaaccccagaccattaccatacccaaatagtagccagaattgtctttagatgtgaagtaaattatatattaaatcttaatctatagt

SEQ ID NO: 1149 - DNA, 1307 bp, Rattus norvegicus
gtgcttttgggtttggcgatcagttccgcgggagtcttgtcaggagcaggatggcggcttcgggcgaggcgcgccgagtgctggtgtacggcggcaggggtgctctgggctcgcgctgcgtacaggccttccgggcccgcaactggtgggttgccagcattgatgtggtggagaatgaagaggccagtgccagcgtgattgttaagatgacagattcattcacggagcaggctgaccaggtcactgctgaggtcgggaagctcctaggtgaccagaaggtggatgccattctctgtgtggctggaggatgggccgggggcaatgccaaatccaagtcactctttaaaaactgtgacctgatgtggaagcagagtatttggacatccaccatctctagccacttggccacaaagcacctgaaggaaggaggcctcttgaccctggccggggccaaagctgcgttggatgggactcctgggatgattggctacggcatggccaagggagccgtccatcagctctgccagagccttgcagggaagaacagtggcatgccgtctggggctgccgccattgctgtgcttcccgtcaccctggatactccgatgaacaggaaatcaatgcccgaggcagacttcagctcctggacacccttagagttcctggtggagaccttccatgactggatcactgggaacaaacggccaaactcaggaagcctaatccaggtggtaaccacagacgggaagacagagcttactccagcctatttctaagttgcacctcagtgcccaggagaaccctcttgaaactctactaacctgtgtctgtattgccgcacctggccccatgttgtctgtattcctgtttgtggtacgagataactagtcccgtttgtctcttacgtagtgctccttttttgtcctgggctggtgaggtatgtttatggggaatgagtgggggcctgtaagtagcaccatcagtgctgaggcccagggaggtatgtgtgcaggccgtcatcccagcatcccagactgctttggagacccgtttgatagttcattttttagcatttggggcactttgaaatccaacttgtttttaaattccatgttagtgccatagatgtagtttttgctgcctgaaaattaactgccatgaaaattcattggtgatgtaagtaagcaaaacctaatggactctgttggatatcatttgtgttccagcctaggctaagtgtttatgagaactattcgtgagtgttcggagtgttcttcctaataaacacatttcatgtccccgaattc

SEQ ID NO: 1150 - DNA, 2415 bp, Rattus norvegicus
cacggcgctccttagggccaccgctcggcgcgccgggacagaccctccccactcctgcctgcaggatcggaacgtcaattaacggctgacactgccccccacctcttcccacccatctgggctccagcgaggaacggatctcggggtacaccatgatcttgccatttttagtactggccatcggaccctgccttaccaactcatttgtgccagagaaagagaaagaccccagttactggcgacagcaagcccaagagaccttgaaaaatgccctgaaactccaaaaactcaacaccaacgtggccaagaacatcatcatgttcctgggagatggtatgggcgtctccacagtgacagctgcccgcatccttaagggccagctacaccacaacacgggcgaggagacacggctggagatggacaagttcccctttgtggctctctccaagacgtacaacaccaacgctcaggtccccgacagcgcgggcactgccactgcctacttgtgtggcgtgaaggccaacgagggcaccgtgggagtgagcgcggccactgagcgcacgcgatgcaacaccactcaggggaacgaggtcacgtccatcctgcgctgggccaaggatgctgggaagtccgtgggcatcgtgaccaccactcgggtgaaccacgccactcccagtgcagcctatgcgcactcggccgatcgggactggtactcggacaatgagatgcgcccagaggctctgagccagggctgcaaggacatcgcctatcagctaatgcacaacatcaaggacatcgatgtgatcatgggtggtggccggaagtacatgtaccccaagaacagaactgatgtggaatatgaactggatgagaaggccaggggcaccagactggatggcctggacctcatcagcatttggaagagcttcaaacctagacacaagcactcccactatgtctggaaccgcactgaactgctggcccttgacccctccagggtggactacctcttaggtctctttgagcccggggacatgcagtatgagttgaatcggaacaacctgactgacccttccctctcggagatggtggaggtggccctccggatcctgacaaagaatcccaaaggcttcttcttgctagtggaaggaggcaggattgaccacgggcaccatgaaggcaaggccaagcaggcgctgcatgaggccgtggagatggatgaggccatcggaaaggcgggcaccatgacttcccagaaagacacgttgactgtggttactgctgatcactcccacgttttcacgtttggtggctacacccccaggggcaactccatttttggtctggctcccatggtgagcgacacggacaagaagcccttcacagccatcctgtatggcaacgggcctggttacaaggtggtggacggtgaacgggagaacgtctccatggtggattatgctcacaacaactaccaggcccagtccgctgtccccctgcggcacgagacccacggtggggaagatgtggcggtctttgccaagggccctatggctcacctgcttcacggcgtccatgagcagaactacatcccccacgtcatggcgtatgcctcctgcattggagccaaccttgaccactgtgcctgggccagctctgcgagcagcccctccccaggggccctgctgcttccactggctctgttccccctacgcaccctgttctgagggcccaggtcccacaagagcccacaatggacagccggctcccctccctttgtggcctgccacctggccgcccacactcaacggggaggcccaggcaacctcgagcaggaacagaagtttgctacctgcctcacttccgcccggaaccctccgtgggtcggattcctggctctgccgttgtttctctattcactgccttttggccagcagggtgggtttctctcttgggccggcaggacacagactgcgcagattcccaaagcaccttatttttctaccaaatatactctccagaccctgcaaccatcatggaacattccagatctgaccttctctcccctaccccttctctctggaacactgggtcccatagtcacagccagtccctcaacccaaccctccttggagggaagaccaggtctgctcagggtgagactcccaggaagccacctccggggttggctgtctacccagggtggccaggctgggaagaacaacccagccggacaggacgcacacactccccacccagctccagagactcgccaacccttcactgaagcgactcccctgtttggaatagcaaaaaaaaaaagaaagaaaaaaaagaaaaaaattttaatttctctttttggtgttggttaaaagggaacacaagacatttaaataaaatgttccaaataaaaaa

SEQ ID NO: 1151 - DNA, 924 bp, Rattus norvegicus
cctggtggttccgcagccgtactctcctggcctggtgtgcacagcctcaccatgagttcttctgcagccagcccgcttttcgcgcctggcgaggactgcggccccgcgtggcgcgcggcccccgcggcctatgatacgtctgacacgcacctgcagatcctgggcaagccagtaatggagcgttgggagaccccctacatgcattcgctggcggctgctgctgcctccagagggggccgggtcctggaagtgggctttgggatggccattgcagcctccagggtgcagcaggcccccataaaggaacactggattattgaatgcaacgatggggtcttccagcgtctacaaaactgggccctgaagcagccacataaggttgttcccttgaaaggcctgtgggaggaggaggcacctacactgcctgatggtcactttgatgggattctatacgacacatatccactgtctgaagagacctggcacactcaccagttcaactttattaagactcatgctttccgtttgctgaagcctgggggtatcctcacttactgcaacctcacgtcctggggggaactcatgaagtccaagtacacagacatcactgccatgtttgaggagactcaggtgcctgcactgctggaagctggcttccagagagaaaacatctgtacagaggtgatggcgctggtgcccccagccgactgccgctactatgccttccctcagatgatcacacccctggtcaccaagcactgagcggctggcccagggctacaaggagaatatgtcctcctcagtgcctttgtagctggagtgtggctccagcctctccactatccctgcagtgtgacatcctaacctctgcctggtacggccatctccccagagctcaggagtaaaataaatgctaccaagact

SEQ ID NO: 1152 - DNA, 573 bp, Rattus norvegicus
aagactgcagcgcctcagggcccaggtttcaacagattcttcaaaatgccatcccaaatggagcatgccatggaaaccatgatgcttacatttcacaggtttgcaggggaaaaaaactacttgacaaaggaggacctgagagtgctcatggaaagggagttccctgggtttttggaaaatcaaaaggaccctctggctgtggacaaaataatgaaagacctggaccagtgccgagatggaaaagtgggcttccagagctttctatcactagtggcggggctcatcattgcatgcaatgactattttgtagtacacatgaagcagaagaagtaggccaactggagccctggtacccacaccttgatgcgtcctctcccatggggtcaactgaggaatctgccccactgcttcctgtgagcagatcaggacccttaggaaatgtgcaaataacatccaactccaattcgacaagcagagaaagaaaagttaatccaatgacagaggagctttcgagttttatattgtttgcatccggttgccctcaataaagaaagtctttttttttaagttccg

SEQ ID NO: 1153 - DNA, 883 bp, Rattus norvegicus
gctagctgtcctcctgggattcagtcatttaaagattgagaccaagattgaaagcatggctgacctcaagcagctcatggacaacgaggtgttgatggcctttacctcctatgcaacgatcattcttgccaagatgatgttcctgagctccgcgactgcattccagaggctaaccaacaaggtttttgccaacccggaagactgtgctggcttcggcaagggggagaatgccaagaagttccttcggactgacgagaaggtggaacgcgtgcgaagagcccacctgaatgaccttgaaaacatcgttccctttctcggtatcggcctcctgtactccctgagcggaccggatctctctacagccctcattcacttcagaatctttgtgggcgctcggatctaccacaccattgcttacttgactccccttcctcagccaaacaggggcttggcattttttgttggctacggagttactttgtcaatggcttacaggctgctcaggagcagactgtacttgtaaagagatttgtgaccgtcaccctctgattgatttaaaaaaataaaggattctatatttctagtgtattaaaaaactttctaaggttttatgtatgaaaggagcagagaaatcaggaatcagggaaaattctgtttgaagactaccatccacaggctctacccttttgtacctgggttagacatttaacatgaccggccttagctatgctgtctaactcctaaagtactttgtcctaagtcttgagtgccttataaattgtaacattccttctacatttcctgtggtgcatctataaaagagtgctcacacctgtgtgaagcctgggtttcattggcacctgaattaaaaacattacaaatg

SEQ ID NO: 1154 - DNA, 2799 bp, Rattus norvegicus
ggtcgaccagctagaacgccttgagttcagacacgcagaagcacacgcctacctacctcatggctacagaaaacggagcagttgagctgggaacccagagtctgtcaacagaccacccacctacagacgcagcaggtgatggatctccagcttcagagaaagaacccagcctcccagacacagagaaagacctgggccccactaacacgaagaaagaccctggcgcgccggatccaaagaaaaatccagatccaccctccctgaagaaaactcccgaagcccctggtccagagaaaaagggtgactcggccccagcttcagccagcaaccagggcccttcaggagagggtgatggaggtgggggccctgctgaaggcggtacggggcctcctgcagtcttgccccagcccactgccacagctgatgccagcatccagaagctggacgccacgcaagcgccctcgggcaaccaggaatctggagaggccaaggcaggcaagaaggcagcagaatgccgagaagcaggacgaaggggctcacccgcctttcttcacagccctagctgccccgcgatcatctcctgttctgagaagacactggccatgaagcccttaagcgagacaacagagctcatctttgcaggggtgtctgaaacccctgatccccaagatcctggtccagctaaggacgaaggagggacgaacacgctggcagacgggaaagaagaggcagaggcaggccaggctgagcaggctaaggtgcaaggggacacctcccagaggatcgggttccaggctgttccctcagagagagcagaggtggggcaggccctctgtctcacggccaaggaggaagactgcttccaaattctggatgattgtccaccacccccagcccccttcccacacaggatcgtggagctgaggaccggaaatgtcagcagtgaattcagcatgaactcaaaggaggcattgggaggtggcaagtttggagctgtgtgcacctgcacggagagatccacaggcctcaagctggcagccaaggtcatcaagaaacagacccccaaggacaaggaaatggtgttgctggagatcgaggtcatgaaccagctgaaccaccgcaatttgatccagctgtactcagccattgagacctctcacgagatcatcctgttcatggagtacattgagggcggcgagctctttgagaggatcgtggatgaggactaccaactgacggaagtggataccatggtgttcgtcaggcagatctgcgacgggatcctcttcatgcacaagatgagggtcctgcacttggacctcaagccagagaacatcctgtgtgtgaataccaccgggcacttggtgaagataattgacttcggcctggcaagaaggtataaccccaatgagaagctgaaggtgaattttgggaccccggagttcctgtcaccagaggtggtgaactatgaccagatctctgacaagacggacatgtggagtcttggggtgatcacctacatgctactgagtggcctctctcccttcctgggcgacgatgacacggagaccctaaacaacgtcctgtctgccaactggtactttgatgaggagacttttgaagctgtgtcagacgaggccaaagacttcgtttccaatcttatcacgaaggaccagagtgccagaatgagtgctgagcagtgcctcgcccacccctggctcaacaacctggcagaaaaagccaagcgctgcaaccgtcgtctcaagtcccagatcctgcttaagaaatacctcatgaagaggcgctggaagaaaaacttcattgctgtcagcgcacgcaatcgcttcaagaagatcagtagctcgggggcactgatggctttgggggtctgaaccccaggcgactaaaagcctggatgcactcgcatggtcaaggctgaaaccagagagagccggccagatctctagagcaggctggtcaggacaaatctgcaccaggcccagaggcttggggctccgcaggtccttaggcttaccgcttcccctacgtgaacatggagtgtggcctggaatccatctgtgaccgcctcctcagcaggctgtgtgaccgcttccccctacgtgaacatggagtgtggcctggaatccactctgtgaccgcctcctcagcaggctgtgcctgtcagccccaccagactccaaggacagccaggccaggccattcctagtctctccctagcttgcccctttgaactgctgccccgtaacctttttttcctgcacctggggcactcttgccctggagcgggatggccgggggtccagcaggtgggctgctgtagtggtggtggtggatgggagattctaggagggtagaaatgcagtcagctgcaggggagacagagcaggctttgtgtgagaggacctccatgccctgcctcacactcccaacagatacaaccttgcacacaccatctggctcctggctcccaccttctgtttgtgaccaccaacacataggaacttgtgagagaaagccagcccaggcctggagaggtggtggtggtagcggagagaagtctgggaggcctgagaaccacccccctaagtttacttgaggaccgagtcttccatcctggctactctgtacccatcccaggggcatctgaaaaccccaaataacaggatgaactggccacaaggagtatgaaagccgtcggggcagacccccaaccgctctcagcttgtgccttataaataaacacacaggttggaggcagcctccttcctctgcgcatgc

SEQ ID NO: 1155 - DNA, 5224 bp, Rattus norvegicus
aaggcagggagttgacggtgaagaaggaacaatgccaggaagataatgaacagggttgcactttgcccatcaaaagtctctaactgcacatctggtggaaacagcacaccagagcaagaacagggagctgccgacacaggtgctagcccattcctgtctttgattactgactgcttagactggttcctgagccagtatagatatatttttttccctgtccctggatccatagctccttcccccaacaatccctcccgtggaatgtctgaaatttgaaacactgtaggccaatggtccaatagaaagccataaccaggtcccgcctcctccttgcctaagacattatcaggaagctcagacttgcaagacccaggtttgtctgctctgtacaccctaccagcacgatgcctatgacactgggttactgggacatccgtggggtgagtgagagcctcttctgctgggtgggacatgtgtggggtgaggagtagctaggatgtgatttccaggagacagattgagtgctgaagttgttggaaagttttgcctctcagggcaagttcaaacacaggggggcttgtgcttatgtggcctgtgtgtgagcttgtgtcgtgactgttcagtgtaaggtgtaggctcaccaagagattgcacagtcagactgtcaggcttttccaatctgtgacttgtgatatgtcatcttcccagctggctcacgccattcgcctgttcctggagtatacagacacaagctatgaggacaagaagtacagcatgggggatggtgattacacctgcttctcagacccctgctcccctgaccctggtgctcagcaactctgctctgaccccctgttgctcagctctacacagctcctggagttgggtttagaaactgtcccttctagaaaccttgaattttggagggctgacttttgaaaatcttagtgatatacagaagcattctctgtccttggggtgtgtgaagtaggtgaaattgcagatcttggggtgttctcatgactcactccttggagggatccctagagaaggaagctgggatactggggtgatttcttttgacatcctcttgtccaccacagctcccgactatgacagaagccagtggctgagtgagaagttcaaactgggcctggacttccccaatgtaggtggagggaaggggaggtgtggggaaggcctagtgctctcacctcatctcctggcctggctgaggggttggcatcagtgtttctgcttgcctgtttcatccctgctggctgcacagtgtttctgtgttgggctgtgtcctggctctcccactcagtcgacaccgtgctcatggagggtttcctggggcagcacactgagtgccagggccatgtctatcctcacccagggaagggattcagctaccccataacccatctgaccatccctgattgtctatccagctgccctacttaattgatgggtcacacaagatcacccagagcaatgccatcctgcgctaccttggccggaagcacaacctttgtgagtggggctgactgcagggtggggacagaagccatccctcttggcttggctggagcaggatgctgagagtgggtctgtgttgtgtgtgctgcaggtggggagacagaggaggagaggattcgtgtggacgttttggagaaccaggctatggacacccgcctacagttggccatggtctgctacagccctgactttgtgagttccaccagccctgagttgaagctggccctgcactcttgctcttgtatcagctctagccccgtttgccaccacagcctctcagtgctactcatggtacagtgtttgaaattgccgacagagtaacccccaagctcagtttgccaaatgaaaacttctagtcatttgctctaagatcgtatccagactctccacagcgacatttagtccctgctaggacagacagagtgtgatccctccagttctagctgctggttctgtcctgagctgtgtctttctgttgccctggggtcttgccatgtctgcagccctcatactcacactatgagaagacactggggctagggaacacttcctcccaaatggcttcccagagctgtgtccttgacacccacagagagaagcagatgctcccaataggcaactcagtcagtcaaaggccttggatcctcggctcctgtttcattttgtcctctcaaattcccctcatttctttggaacctgtactgaagtcctcactgccccagtaggcagaacactacctgtttcctgggccgtttcagttgtttgcttctgcctcatgtgaggtcagagttcagagtcaggtgcctacaactgtctcatgcaaggtggttctgataatgatggtggagtccagggaacagagctgtatcttgttgggctgtttccaaagaacagtctaatcatggtgttgctctaactaaacacgtgggcctcaacccagactgaatctcacgaaggtgactgcttctctgcacgctggggcctgtacagccctgtgaggccagcctctgccagggagcctgtgtctgaaggtagtgatggttgttctctgcttcaggagagaaagaagccagagtacttagagggtctccctgagaagatgaagctttactccgaattcctgggcaagcagccatggtttgcagggaacaaggtaaaggcagcgggtggggagaaggatttgccatttcttcccaggtgtcaaattctagcactcacccttggcttcctgcagattacgtatgtggattttcttgtttacgatgtccttgatcaacaccgtatatttgaacccaagtgcctggacgccttcccaaacctgaaggacttcgtggctcggtttgaggtgatgtcctgaccccgcttcctcttgacctacttcccttccccccttccagaatgcctttctactccttgaaatggagatgaaaatggctagcttctgttgagcatagaactgtgttctgctctttcgtcccttgcatggagtttcccagcacaccctgcatgttgtgtaggattatcagctccttaggatcattttggaagcggattgtaaagactcagttcctcagggagtcagtaccattggaaggggacgtggtttttttccagtgtgcttctagcttccaagaacagggggcaatagatctaccggataccaaaggaaaaaagccataggttgcaatagagcctggattttccagccctgaagcctatggaaattcaggacatgcccggaatgtatagggagcactattcaggattgatgcacagtaccaagatacagtatccatatctggcctatacaattctttgctcagtcagacccctgagtggggaagcactgggacccagggctacagttagtgtgagtagacagctcactgctgttggaggattttatcctccaacatcctgtttctttcctttccttttcctccttggtgacatcttgatgtttgactgtagaatcattacagtgagactgtactgccatcgtcatcttctctagtgtggcctccgtgtggcacagttctgagctcagtacgatgtggaaacctgcgtctctgtccaggcatgcagagtggcaggcacgcctgactatgatgtacatgtgatccccacaagccccactttattagagatttgggggatcgaggccatagtccaatgggaatcttagcgtggggtcttctcctctgtccctgctgcacacgtgatgcgtttttccttagttttcattggcttgccttctggtccagcctgctcggctctggagattgtgtgagaactgttgaacagtgtggtgggagagtgtgggaggctgcagtccaaggccagccaagcctggcttcttgggtaaggctgccctggaactttgaattcatcacagtttatctgggcaccgtactggaaagatagcacacagcacagtgccattctgtagaatgttctctagcagggctgagtctaggcaggatggacacactaagtatgcatttagctcccagtgttctgagtgtagatttttctgcatcaggagaatggccaaggccactccattggccttgctgtgtcacctatccctctgctcattcagtcaggatttcctgaggtactgggtgagatctttgctctcttccaaagtacactggcatgttactggtccctttgacctgtttggtcctttcccaatgtggaaacgcagggcaagaaggagcctgcaggtaaaaaagaaaagaaaagaaagcgagaattgcgtaaccgggtagcaacaaggtagcttagggagtgaaccgagggaatcagaatggaggctgctgagcccctccctgtgtagaccgggatgcagactctcgctgttcctgctgagcctgtgtgcctggcttcctcctggcaggagcacagcactgttttgcgggattctgtggagagctccctcttcttctatacctgcaccacagctgcagatggacgcagctgaacgcagtgccagtttcccctacatcagaggacattaaagcatccccttaccagagttgtgcccctgagcaacccgggctgtgttggggttcttagagatgtcccagatcctcaattctcgctttctcctcctcctcccttcagggcctgaagaagatatctgactacatgaagagcggccgcttcctctccaagccaatctttgcaaagatggccttttggaacccaaagtagcaccacaaagtccagacctggggatactcatgagtgccctgctggctgtgggcctagagcatggctctggcgcccaccacatgcagctttctcctcctttccattccctgttcctccatctcctcttcccagcccttgcctcagtcaagcctcagttccctggtctctccatttcttcattagtcccctcccttgtctctgccctgcatccaacccttccctcactgattttcggaggactgtaccagacccctgaatccccagcctggcctgagagattagatctcactgtgctgccctggtccccaggaaggacccatttgatttgcaataaagtgtgaaccacatttgtccagtgtcctgttttgctgtctgtgacactcagggctgactgtgttgacttggttgattttgttttgttgctcgcaggaggagctagagggatggactctgggctatttga

SEQ ID NO: 1156 - DNA, 1232 bp, Rattus norvegicus
gttttccgtccggcttctctcacactcaagtgcgcgcctccacctcatggaagactcgatggacatggacatgagccctcttaggcctcagaactaccttttcggttgtgaactaaaggctgacaaagattatcactttaaagtggataatgatgaaaatgagcaccagttatcattaagaacggtcagtttaggagcaggggcaaaagatgagttgcacatcgtagaggcagaagcaatgaactatgaaggcagcccaattaaagtaacactggcaactttgaaaatgtctgtacaaccaacagtttcccttgggggcttcgaaattacaccacctgtggtcttgaggttgaagtgtggttctgggcctgtgcacataagtggacagcacctagtagctgtagaggaagatgcagagtcagaagatgaagatgaggaagatgtaaaactcttaggcatgtctggaaagagatctgctcccggaggtggtaacaaagtcccacagaaaaaagtaaaacttgatgaagatgatgatgaggatgatgaagatgatgaggatgatgaagatgatgatgatgatgattttgatgaagaggaaactgaagaaaaggttccagtgaagaaatctgtacgagataccccagccaaaaatgcacaaaaatcaaaccaaaatgggaaagatttaaaaccatcaacaccaaggtcaaagggtcaagagtccttcaaaaaacaggaaaaaactcccaaaacacccaaaggacctagctctgtagaagacattaaggcaaaaatgcaagcaagtatagaaaaaggtggttctcttcccaaagtggaagccaagttcattaattatgtgaagaattgtttccggatgactgaccaggaggctattcaagatctctggcagtggaggaagtctctttaagaaaatggtttaaacagtttgaaataattctgtcttcatttctgtaatagttgctatctggctgtcctttttataatgcaaagtgagaactttccctactgtgtttgataaatgttgtccaggttcaattgccaagaatgtgttgtctaaaatgcctgtttagttttcaaggatggaactccgccctttacttggttttaagtatgtatggaatgttatgataggacatagtagtagtggtggtcagatgtggaaatggtagggagacaaatatacatgtgaaataaactcagtattttaataaagt

SEQ ID NO: 1157 - DNA, 4835 bp, Rattus norvegicus
gagcagaggcgcaggacgtccgtctccgcgcgcgtgacttctgcctgcgctcaagcttcagagttcagtttcaaggagccgcccaaccatgaagacaccgtggaaggttcttctgggactgcttggtgtcgctgcgcttgtcaccatcatcaccgtgccagtggttctgctgaacaaagatgaagcggccgctgatagcgcgagaacttacacactagctgactatttaaagaatacctttcgggtcaagtcctactccttgcggtgggtttcagattctgaatacctctacaagcaagaaaacaatatcttgctattcaatgctgaacacgggaacagctccattttcttggagaacagtacctttgagatctttggagattctataagtgattattcagtgtcacccgacagactgttcgttctcttagaatacaattatgtgaagcaatggagacactcctacacggcttcatacagtatttatgacttgaataaaagacagctgatcacagaagagaagattccaaataatacacagtggatcacatggtcacaagaaggtcacaaattggcatatgtctggaagaatgatatttatgttaaaattgaaccacatttgcctagtcataggatcacatcaacaggaaaagaaaatgtaatatttaacggaataaatgactgggtttatgaagaggaaatcttcggtgcctactccgcactgtggtggtctccaaacggcacttttctagcttatgcccagtttaacgacaccggagtgcctctcattgaatactccttctactctgatgagtcactgcagtaccccaagacagtctggattccgtacccaaaggcaggagctgtgaatccaactgtaaagttctttattgtaaatacagactctctcagctcaactactactacgattcccatgcaaatcaccgctcctgcatctgtgacaacaggggatcactacttgtgtgacgtggcctgggtttcagaagacagaatctcgttgcagtggctcaggaggattcagaactattccgtgatggcgatctgcgactatgataagaccaccctagtatggaactgtccaacgacgcaggagcatattgaaacgagtgccacaggctggtgcggaagatttaggcctgcagaaccccacttcacctccgacggaagcagcttctataaaatcgtcagtgacaaagatggctacaaacacatctgccagttccagaaagataggaaacccgaacaggtctgtacatttattacaaaaggagcctgggaagtcattagtatcgaagctctgaccagcgattatctgtactacattagtaatgaatataaagaaatgccaggaggaagaaatctttataaaattcagcttactgaccacacaaataagaagtgccttagttgtgacctgaatccagaaagatgccagtattactcggtgtcacttagtaaagaggcaaagtactatcagctgggatgccggggccctggtctgcccctctacactctgcatcgcagcactgatcaaaaagagctgagagtcctggaggacaattctgctttggataaaatgctgcaagatgtccaaatgccttcaaaaaaattggacttcattgttctgaatgaaacaagattttggtatcaaatgatcttacctcctcattttgataaatccaagaaataccctctactaatagatgtatatgcaggtccctgtagtcaaaaagcagatgctgccttcagactcaactgggccacttaccttgcaagcacagaaaacatcatagtagctagctttgatggcagaggaagtggttaccaaggagataagatcatgcatgcaatcaacaaaagacttggaacactggaagttgaagatcaaattgaagcagccaggcaatttttaaaaatgggatttgtggacagcaagcgagttgcaatttggggctggtcatatggagggtacgtaacctcaatggtcctgggatcgggaagtggcgtgttcaagtgtggaatagccgtggcgcccgtgtcacggtgggagtactatgactcagtatacacagagcgttacatgggtctcccaactccagaggacaaccttgaccattacaggaactcaacagtcatgagcagagctgaaaattttaagcaagttgagtacctccttattcacggtacagcagatgataatgttcactttcagcagtcagctcagatctccaaagccctggtggatgctggcgtggatttccaagcaatgtggtacacggacgaagaccatgggatcgccagcagcacagctcaccagcacatctattcccacatgagccatttcctccagcagtgcttctccttacgctagcatggcaaggctctccgcagcttactcaagagcacacttgtcctcattatctcaaaactgcactgttaagatgacgattttaataatgtcgcctcgagaaattccagcctacttcccagttttatacctgcaatcctaactaaggatgcctgtcttcagaacagattattaccttacagcaatttggatttccccctctgttttgtttatcatttaaaaccatttccacatcagctgctgaaacaacaaatataaattatttttgcaagagctatgcatagatttcctgagcagaatttcaatttttttcccccttactaggctggtccaaatcttgttcccttatttaagggggtggcaagacgtgggtaatgatgtcattaggccagcaacaagagaagcgggaacagagaatatggctagaaacccaggtccaagcatacaaacccaaccaggctactgtcagctcgcctcgagaagagctgctcactgccagactggcaccgttttctgagaaagactattcaaacagtctcaggaaatcatatatgcaaagcactgacttctaagtaaaaccacagcagttgaatagactccaaagaaatgcaagggacgctgccagcaatgtaagggccccaggtgccagttatggctataggtgctacataaacacagcaagcctgatgggaaagcatgttaaatgtgcttttaaaaattaccaagtctcctagtgagaagaggcagcttggaacatagcgacttgccccgttaaaagttgaaaatatttgtgtcacaaattctaacatgaaggaatacttgcgtcagttcttcctacttcctttctttgagcattttcattaaagcattttaacttcattatctttctaatggaaaactgtatgagaatgttttgtgttattatttctattctacacactggaatgttgcctggtcatttagcaagtatgcttccattttttcaaaggtaatgggttatatcttgaatcaaacttaaactgcattgacatatggacacatttgttcaaaggttcttgtttaacttgtgtgaaatccaagactgtcttgtaaacatggaaagagttcaacttttaaaaaaaaatttagatacataaaactgtttaaagttatatgattcataagagtttatctaatacccccagaaatttctactcacatttatcacatagcttggtcatttacatactatggaactcataatattatttaacttaggggagcacgtgaggttcgtggcacgagatggaatgctatcagcagagtagacatgtttttccagggtcttgttttttgtttttgtttctggtctcttcctgtttgggcggagggtaatataatagataatatacataatagaatacactctgatacctgacttagccgtgttttgacaacttggaaacttgattcaattatttataacacagctgaaaatttaaaatggactccacacatttaaatgcagtttcaggccaattttctaggtacaattaccacagacaggtgagctacagcataaattccaaacatggcagaaatggaaattacctataaatataaatgagtttagatattgatgagcctgatgctatttcccgggcactccactgttcccctcaccttaaggaactctcaagtcctgctcttccactgcaagcacagctggtccttaaatctacaggcctctggctacagtccgaatttgaacacagttctgtcaccgtgtgcagcagcagcagccatgtgcaaagttctagatcaaggaacaaaggtagcacatgttcctgacagtgtggaaacataaacataaatgcgaattaaatagaaattatcccttctgaattctttttgttcctttcatttctaaataggttgttcctggagcctgaattaataaaaagaacacagcacacatttttcaggcgatgagggtttcacatggtgataatgtgaatacattcagtttttatttgattctcataggtcaagttttactgttcggtaagagttgtaaattagattaaaaccctgatgcataagttgtaaacaaacttaatttaagagcaagtttgaaaagcacaagagctaataacaccactgaggcatatagacaagtctcttatgggcatatgcagctccctgaagcgcatggatcaagctaccgcctcagagcacaccagcaccaggggcgcatgctaaaggaagagctcccctccccaccccccatgcttcacgatccatgttgacttcagtctgtgccattctgggcatcatagttctccttcagattattagcagttccacctcttggcacgtactacttttgctctaagttggagtgagagtactggtttataagattactggatttgtacaatatttaagattcaataaattctaagtg

SEQ ID NO: 1158 - DNA, 7780 bp, Rattus norvegicus
ggatcccggcatccgggcttggaaaggggttttagttgagaattaacaaaccattaacagcgtgtacatagtaacaagttggagttactcctaagtcttcccaatactgaatatgtaagtaaccagtcagtcccacttattctttaacaatgtaactttggtgggggctggggatttagctcagtggtagagcgcttacctaggaagcgcaaggccctgggttcggtccccagctccaaaaaaaaaaaaaaccaaaaaaaaaaaaacaaaaaaacaatgtaactttggtggatacaaattcactgcccagactcttttccggtccagacttctcaaagtgacttagttgtagctaccctgaaagatttaacagaataagggacagctgttggcttgaaacccctcaacctcttccctaacatgcgactcttgcttagataaaaggcattatcttagcatgcaactggtgcctagaatctagttggaagctaccaacgtaaaacggagtggctctccagcctctgctggcttgtctctcagcaagttttcaggcataggcacacagggtggtgaagcagggtcaatctacaccacgaagtctagtctacgtggcccgcacacaactcaaggcccatccatcctcggctcgcacctgcgatcccgccagggaataaatactacgcgctgaatgcaaagccgaggaagagttttgctagtcttccaggccagggctcagccgttaggacccggggagagactgcgtgattgaaccggttgcaagacggacgaccaagcgcctgtgcgcatgcaccggccgaatcccgcctgctgcccataggaccctgcggcaagctggtagtcaggactggtggtgtggtgcgcgtgcgcgggcctgccgcagggagtgtccggcacgaggccgggcggggagcgcgggcggatgggcggggggctgggcacgcgcggcgccccgccccactgacgcgccgggcccgcgcctcccgcctccggcgtcgggaaccgggttggccgccaaggagtccccgcccctcccccgcgcctcccggccggaaccgatcggggctggtttgagctggtgcgtctccatgacgacgtgctccgcctataagtagcggcgcgtcgcaccgtcgggctttgtcagtccctgcagccgccgccgccggccgccttcagtcagcagctcggcgccacctccggtcggcgactgcggcgggctcgacgaggcggctgacggggcggcggcgggaagacggccgggtgcgccttggggtttagtggcggcttctccatgggtccagccagccgcttccctgtgctgtgaggtaagcggggcgcgggaggattgtgcggccacgtgtcgcgaggcccggactgcggtcgccggcaggggacacgtggccggaggctggtgaccttgcgagcctccgccctgaaggcagcagctgttcctggcccttgctgcaagccctcggatcgccccatgggagcccgcatcgtgtcagccgggctcggcgctccacttgcccgggcggtgatggagggcaggtgcaggggagcccggccgctagcagccgccctgcagtttcctgctttctttagttttgctacgtgtacagagcagagctgatgactcgaagtggaagtcgatagacctaatttagtcagggagtccctgctaatgaatactcaccggctgtgacttggatttagaactgaactctttgaatgacttaggggtttacgggaaaccggattcccggctgtcttggaagcccgactcagaatcctcaataactggtagaactggggagcagatcctgtcaggaatgtctgggagaggacaaaagaatgcagtggcttgttttattcaaacctaacatcgggcagaatttgactggagttcatttttgttttaattggcttgtatctcatccagatttaacttcttgtgctaattgtttaacaggatttagctgcttcccatgccaaagtgttagcattttttttcttttatcttttttttctttttctttttttttttttttttttttttgtattgaggcaaagatagggaaaggcaaaataagtggtatttcaatgaaagttttccaggtttaagccggaaggctgcctggaaaatacttaacaagacctaaaattacaaagttactgccaaagcccattcatcagttctaagtgatatacaactgagttggctggcgctggtctgtagtcttcacttaagagaggtttatgcagctaacgaagttgaccagtgccaaaagtctccttaaagcttaaagtgtgctttatcatgcatggatttggatttatgacaggctcatccccgtgggcctctcatagtgtcccgtgctagagcaaactggctcctaaccattgcccagccttggtgcatgtaggctgctggcactgaagtgggtcacacaatggaaaaaagttttacctggccacttgctgctggtgtccatttcataagacccaggcaggagcttttattaagcgtggtgatcttgcttatttttgttagtaaaaaagttggccaaaaatttcttccatatggttattatccataagtggatattagaaggcacttgaggactgttggattcccagaagtgcgcatttggtaggcaatccaggctctagaatactgatgtttcataacagtaacaatatactgtgaattgaatttttttaaatgctagtactgcataaaagttagggaagttttggtggattgcacactaacattgagtgctctggatacctgatatactgtattcactaagtcattcagcataactctgcaagtgggagaaaaagaccttttcaggactgcatgttactgtatgcccattaaagtttttgaagagctggaatggctcaaatgaagcagataggaacatgtaataatgccagtaattagactgttaactccgttccgttttggagaggggcagggattgagatgttctatgtgtatagagctgtggcattcagttttgaacagtgtggaatctatttgaggtattggagatatttggggggggggtcttcacgtagttctgacctcacagttgatcttcctgtactgtgtactctctggtatactgttgcagtgtgtaacctttaatggtaagatttcaagggagatagcaacatgttgtgtttctactcactagtgtttccaccactccaggagacagcattcagagttgaccttgtgagagctggccataatttaattccatctctaggttttctgtgtaagtatcagtttatacttgtgaatttgtgttgaagcagtgctaagactttgagtgcattcacttattatctgcttattgtcagcttattgtttcagaggcacatcgagaaccaaccatgggcagctttactaaggaagagtttgactgccatatcctcgatgaaggtttcactgctaaggacattctggaccaaaaaatcaatgaagtttcttcctgtgtaagtacgggaagcccacagccacaactcaaaagttccataaaagagcatgccttgccagagaatctagaatttgactgactgggctgtctagtgagtgtccatgtcagtactgctaacagggataggattttgttagggaagggggaaaaagatcttcagtgtggccaggtgcaagactgttaatgaggtccctgaacccactcactctcattccaggatgataaggatgctttctatgttgcggacctcggagacgttctaaagaagcatctgaggtggctgaaagctcttccccgtgttactcccttctatgctgtcaagtgtaatgacagcagagccatagtgagcaccctggctgccattgggacaggatttgattgtgcaagcaaggtaagactgcttatctcaccccaaaagggttatcagttgatgtgcttttgtttgtcaaactccgtctatatatactgatcttctctttcagactgaaatacagttggtgcaggggcttggggtgcctccagagaggattatctatgcaaatccttgtaagcaagtgtctcagatcaagtatgctgccagtaatggagtccagatgatgacttttgacagtgaaattgagttgatgaaagttgccagagcacatccaaaggcaaagtaagtcttctgattgagcacaaaaaggctgggcttgctaggcagactataatcttggttccttattcctatacatagtaagaaccaggctaaaccctgggttagaatcagacccacaagcagtagtgcctagacaggctgattggatgaacgtgtacagagtgcttacttggtgcatgcacttgtttctgtccacctaggttggttttgcggattgccactgatgattccaaagcagtttgtcggctcagtgttaagtttggtgccacactgaaaaccagcaggcttctcttggaacgggcaaaagagctaaatattgatgtcattggtgtcaggtgaggtctcagtgatagttacagactgagacattaaattttaaggcccttttttcctctgagaactagtcaaagaacagcatcttgtttttatttcagcttccatgtgggcagtgggtgtactgaccctgagaccttcgtgcaggcagtgtcagatgcccgctgtgtctttgacatgggagtaagtacatgactcctggaggagggctgtcttgattgaaataaccaaaccactgaatctagaatttgcctcttgtagaagctgtctgcataacagattttaaaaccatctgtcctgtgcatttaaacttgtgaatctagcaatttgacttccaaattttcttgattctagacagaagttggtttcagcatgtatctgcttgacattggtggtggctttcctgggtctgaagacacgaagcttaaatttgaggaggtaattattacaacattaacctacagacggtgagatatgtatttaccattgtggtgtttttactgattaaaggagccaacatgcctggtgttttgttctcactacttgttatttgcaactgtagcccaggctggccttgaactttcagttctcctgcctgtttcccatattttaatgtttagctcagtgcttatcactattgtactatgaagtagacagggtggaaggagttatatcttgttggcatgtattcagaattcagcatttggcccctcttgtaatccattttgtgctattttattaaatattaatataaactattcataatgtgttagaaagagatggtcctgaggggagtgggaagtggtgtatgtacagactagtttccagagaggtttgttgcttctgttgcctgatgacagacctgctatgctaggtcatgtcctgttcttacacacagcagtgtgatctttctcctcaactataacaaatggctgctcccttctctcacttagatcaccagtgtaatcaacccagctctggacaagtacttcccatcggactctggagtgagaatcatagctgagccaggcagatactacgtcgcatcagctttcacacttgcagtgaatatcattgccaaaaaaaccgtgtggaaggagcagaccggctcggacggtatgtggtggcaggatgagtgagtcatgtgggataacagttgatatgctgggtggtaattagggtgatctgtttttctagatgaagatgagtcaaacgagcaaactttgatgtattacgtgaatgatggagtgtatgggtcatttaactgcattctttatgaccatgcacatgtgaaggccctgctgcagaaggtgagttctgagcgcatgctctagcagtgagtgatgcataggatagagagaacattgggccgagagatggctcagcagttaagagcactgactgcttccagaggccctgagttcaatcccagcaacaacatggtggctcaccaccatctgtatgtaatgatgccctcttctggtgtgtctgaagaatagctacagtgtatttataatctttaaaaaaaaacaaacaaaaaacaaacattgtctttatacagagacccaagccagatgagaagtattactcatccagcatctggggaccaacatgtgatggccttgatcggatcgtcgagcgctgtagcctgcctgaaatgcatgtgggtgattggatgctgtttgagaacatgggtgcatacactgttgctgctgcttctactttcaatgggttccagaggccaaacatctactacgtaatgtcacggtcaatgtggtgagtggggctgtgcctgctcatgctcttttggttgctcagtgtaatgtttgcctactgtgagccagaagcctgggttatgcctgatgcacacacacacacatactatggggggaaggcagtatgtgctgaggggaaggatcacctgacctgtctcaaagggactgaatttgtgcttgctttttatgtttgataagttttttttttaccttgagctaaatacagaaatggagtttttccaagtaattactgctcatcttcagatatttactactaggagaggtcttacaagtaagccattagattcttttgcaactaaaatattcaagttagcatatgtgacctgtgggttccttaataatgaaattttacattggattgtttcctggtatagtgacagggtgaggtgtcaggagatctcttgggaggctgcccaatttggagggatttgggttttgaatatgccatatatgcctttgtttttcaggcaactcatgaagcaaatccagagccatggcttcccgccagaagtggaggagcaggatgttggcactctgcccatgtcttgtgcccaggagagcgggatggaccgtcaccctgcagcctgtgcttctgctagtatcaatgtatagatgccattcttgtagctcttacctgcaagtttagcttgagttcacggcatttggggggaccatttaacttaattactgctagtttggaatgtctttgtaagagtagggttggcaccaatgcagtatggaaagactaggagatgggggtcacacttactgtgttcctatggaaactttgaatattttatatggatttttattcacttttcagacctgatactaatgagtgcccctcggctgctgagcaagcatttgtagcttgtacattggcagaatgggctaaaagcttatgttgtgacccattttgaaaataaagtatcttgaaatgattggacattggagaatgtgtgcaagtatcccttacagaaggcacaaacttctgcacaggctgtgtgttacagcagtgagtctagcccagcagagatgtggatgatacaaagctgtgccccctctgtacagcatcaatgtgcttagcccatctcaagtgtttactgtgaacttggtgcccaaagtctcttaagagtgtcatctgcctagtggcctcttgacttggccacttcctaaggagagggcatctgaggctctttgaaccttgcctgcagaaaccctgactgctccctcaacccttggcctcagctgcatcaccacctagtaacagttgaagtatcgaacagcacttggcagtcaacttcctgtaataaattcaacaacagcaactactgtgttgtaaatttttaccttgacctttcatattatagtcctgctcagtttatacacctattgcatccccaaagaaatgccagactcttaacctagttagtattgaagacctgtaggtcaggaggaagggatcc

SEQ ID NO: 1159 - DNA, 1164 bp, Rattus norvegicus
gtgtctgttctgcggaacagtaggcagttgttttccgtccggcttctctcacactcaagtgcgcgcctccacctcatggaagactcgatggacatggacatgagccctcttaggcctcagaactaccttttcggttgtgaactaaaggctgacaaagattatcactttaaagtggataatgatgaaaatgagcaccagttatcattaagaacggtcagtttaggagcaggggcaaaagatgagttgcacatcgtagaggcagaagcaatgaactatgaaggcagcccaattaaagtaacactggcaactttgaaaatgtctgtacaaccaacagtttcccttgggggcttcgaaattacaccacctgtggtcttgaggttgaagtgtggttctgggcctgtgcacataagtggacagcacctagtagctgtagaggaagatgcagagtcagaagatgaagatgaggaagatgtaaaactcttaggcatgtctggaaagagatctgctcccggaggtggtaacaaagtcccacagaaaaaagtaaaacttgatgaagatgatgatgaggatgatgaagatgatgaggatgatgaagatgatgatgatgatgattttgatgaagaggaaactgaagaaaaggttccagtgaagaaatctgtacgagataccccagccaaaaatgcacaaaaatcaaaccaaaatgggaaagatttaaaaccatcaacaccaaggtcaaagggtcaagagtccttcaaaaaacaggaaaaaactcccaaaacacccaaaggacctagctctgtagaagacattaaggcaaaaatgcaagcaagtatagaaaaagcgcattgaacattcctgggcactactggtaaattaagcccaaagatggggaaagaggaaaaggagaaacaaatatagtaccatcaacaatccagactgaagtcttctattttaatctcaatcccctttcctgattggccatccattcccccttgcaggctggaagcaatcgaaaacctaaagcatttttctttttcactcgggtgatgcagaaaacttgactgcttttctataccacttgtgcatatgccttaactctgaccatgttttaattttaacctttgtatccttagctgctcgaaataaatttttgaatgaaccaat

SEQ ID NO: 1160 - DNA, 1440 bp, Rattus norvegicus
cggccgtccgtcccgccatggctgcgcgcctgctcctccgctcccttcgtgtcctgagcgcccgctcggcgacactcccgccgccctccgcccgatgttctcattctggagcagaagcacgtctagaaactccttctgctaaaaaattaactgatattggaatcagaagaatcttttcctcagagcatgacattttccgggagagtgtaaggaagttttttcaagaagaagtgattccctaccacgaagaatgggagaaagccggagaagtgagtagagagctctgggaaaaagctggcaagcaaggcctgcttggcatcaacattgcagagaaacatggcggcatcggtggggacttgttgtcaacagcagttacttgggaagagcaagcatactcaaattgcacaggccctggtttcagcctccattcagatattgtcatgccctatattgcaaattacggcacaaaagaacagatcgagcagtttatcccccagatgacggcgggcaagtgtattggtgccatagccatgacagagcctggggctggaagtgacttacaaggagtaagaacaaatgccaaaaggtctgggagtgattggattctcaatggaagcaaggtgttcatcactaatggctggttaagtgatctcgtgatcgtagtggccgtcaccaatcgtgaagctcgatcgcccgctcatggcattagcctctttttggtggagaatggaatgaaaggatttattaagggcaagaagctacataagatgggaatgaaagcccaggacacagcagaactattctttgaagatgttcgattgccagctagtgccctacttggggaagagaataaaggcttctactacctcatgcaagagctcccacaggaaaggcttttaattgctgatttggcaatttctgcctgtgagttcatgtttgaagaaaccaggaactacgtgagacaaagaaaggcttttggaaaaacagtcgcacacatccagactgtgcagcacaaactagcagaattgaagacgaacatatgtgttaccagagcttttgtggacagctgcctacagctgcatgaaaccaaacgtctggactccgcctccgcttccatggcgaaatattgggcatctgaattacaaaacactgtagcttatcagtgtgttcaactccatggaggctggggttacatgtgggaatacccgattgcaaaagcctacgtggatgctcgagttcagccgatctacggtggtaccaacgaaatcatgaaagagctgatcgcaagacagatcgtcagtgacagctagacatctgcctacatcctgaaatcctactacatcacagctaatccggattcaaatatacttgagataaagtggaacctggaagggggggggggtagtaaagctggttttatgtatgattgttacagagaaa

SEQ ID NO: 1161 - DNA, 2104 bp, Rattus norvegicus
tggtatacagcggagatggcgactgcagtccggctgctggggcggcgagtttccagttggagactgcggcctttaccgtcgccccttgctgtcccgcagcgggcccactcgatgttgcctgtggatgatgatatcaacgggctaaacgaggagcagaagcagcttcgtcatacgatatctaagttcgttcaagagaacctggcccccaaggcccaagagattgatcaaagcaatgacttcaagaacctgagagagttctggaagcagctgggaagcctgggagtcctgggcatcacagcccccgttcagtatggtggctctggcctgggctacctagaacatgtgttggtgatggaagagatatcccgggcttcagcagctgtggggctcagctatggcgctcactccaacctctgcatcaaccagattgtccgcaatgggaatgaggcacagaaagagaaatatcttcccaagctcatcagtggtgagttcatcggagccctggccatgagtgagcccaacgctggctctgacgttgtctccatgaggctgaaagcagagaagaaaggagatcactacgttctgaatggcaacaagttctggatcaccaatggccctgacgctgatgtcctagttgtctatgccaagacagacttgactgctgtgcctgcgtctcggggcatcacagccttcattgtggaaaaggatatgcctggtttcagcacctcgaagaagctggacaagctaggcatgaggggctccaacacctgtgagctagtctttgaagactgcaaggttcctgctgctaacatcctgagccaagagagtaagggtgtctacgtactgatgagcgggctggacctagaacgcctggtgctggcaggtggaccccttgggatcatgcaggctgtcctggaccacaccattccctatttgcatgtgagggaagcctttggccagaagatcggccaattccagctgatgcagggaaagatggctgacatgtacacccgcctcatggcatgtcgacagtatgtctacaatgtcgccagggcctgtgacgagggccacatcactgccaaggactgtgctggtgtgattctgtatacagccgagtgtgccacacaagtagccctggatggcattcaatgtttaggtggaaatggctacatcaatgacttccccatgggccgctttcttcgagatgccaaactgtacgagatcggaggtgggaccagtgaggtgaggcggctagtcattggcagagctttcaacgcagacttccgctagcctggggccatcaccctgctcccagcagcaggaggcctttggaagcagagacgtggcagccctctgacttggctaaggaagctctgctgctcaactgccctcttgccagccctctgctcttcgtgaagtcggattctccagccgtgccagccagtcaatcaagaaagcctaaaattcggtccccagctccgaaaaaaaaaaaaaaaaaaaagaaccaaaagaaagcctaaaatggctgctaaaaggactttggcttttctggggtttgcagggagggtaacagtgtctgcgcccttgttctctacttctgaatgtagtaacctcaccctctggggtagcatatgacaggtacccaactccttttcgtgggcaagcctctggcaggggagctctttctgttgcaatgtaacagaggcattgcctctttcaattgtcagatacttgtggtctcttttcttgaggaaaaggcaaaaaccatgtccttcttagctgtttccccaagagctagctagacagttccagaatgcctgtgtggcagacccatgaagggcagagtccacagtctagccaagacaacttggagattggctccctggtgtggctgagtgtctacatcactccgtcacaggctagcactgggcctgctcacgtgaccttctgcagctgcctgactccggtggcccagcttaggttgcctggctcaactccagccttgctgtctatgtatatttctctagacgccctgtggctaattttgttacaaccacacaggctctgctgccattttgtattaaacatactgcaaagtaaaaaa

SEQ ID NO: 1162 - DNA, 2484 bp, Rattus norvegicus
gaattcagtcacggactttatgcctttgaaagttgtcaccattttattgtcaccctccatcttaaccactgccttgaccttttccccagtcatggtctccagttcgcactcctcccccaaggtgaactcattgtggatcaccttggacccataggtgatggtggctgagggtggctgactgaaaaacggacttccagatttcttactcttccacaagggccctcatcacgtgcgcaggtctctaaccttactctctgaaaggatggcttgccttcttcctgctgctcgacttcctgcaggctttctcttcttagtgctctggggctcagttctaggtgacaagctgctggtggtcccccaggatggcagccactggcttagcatgaaggagatagtggagcacctcagtgaacgcggacacgacattgtggtgctagtgccagaagtcaatttgcttttgggagaatccaaatactacaggaggaaaagcttcccggtcccctacaacctagaagagttgcggacccgctatcgctcctttgggaacaaccactttgctgccagttcccccctgatggctcctctaagagagtacaggaacaacatgattgtcattgacatgtgctttttcagctgccagagcctcctgaaggactcggccaccctcagcttcctcagggagaaccagtttgatgctctgttcacagacccggccatgccctgtggtgtgatcctggctgagtatctcaagctgccttccgtctacctcttcagaggtttcccatgctctctggagcacatgcttggtcaaagcccaagccccgtatcctatgttcccagattctacaccaaattctcagaccacatgacatttccccaacggctggccaacttcattgctaacatcttggagaactacctttatcattgtctgtactcaaagtatgagatccttgcctcagacctcctcaagagagatgtgtccctacctgccttacaccagaactctctgtggctgttacggtatgattttgtgttcgaatacccccggccagtcatgcccaacatgatcttcattggagggaccaactgcaagaagaaggggaacctgtctcaggaatttgaagcctatgtcaacgcctccggagaacatggcatcgtggttttctctttgggatccatggtctcagagattccagagaagaaagcgatggaaattgctgaggctttgggcagaattcctcagacggtcctgtggcgctacaccggaactagaccatcgaaccttgcaaagaacactattcttgtcaaatggctaccccaaaacgatctgcttggtcatccaaaggctcgggcgttcatcacacactccggttcccatggtatttatgaaggaatatgcaatggggttccaatggtgatgatgcccttgtttggtgatcagatggacaacgccaagcgcatggaaactcggggagctggggtgaccctgaatgtcctgaaatgactgccgatgatttggaaaacgcccttaaaactgtcatcaataacaagagttacaaggagaacatcatgcgcctctccagccttcacaaggaccgtcctatcgagcctctggacctggctgtgttctgggtggagtacgtgatgaggcacaagggggcgccacacctgcgccccgccgcccacgacctcacctggtaccagtaccactccttggacgtgattggctttctcctggccatcgtgttgacggtggtcttcattgtctataaaagttgtgcctatggctgccggaaatgctttgggggaaagggtcgagtgaagaaatcacacaaatccaagacccactgagaagtggcaggaagtgaaggagaagtattagtcccttatccaatcagttgaaacttggaaacaagtgttaaatccatgttgcttttattagggaaataattcaccatacactatacacccagaacatttttttttctttttctttttttcggagctggggaccgaacccagaacatcttctttttttaaataaaaacaatctaattgctggccacacccatcagggaagatactggaatatgtgatctgtttctccagtatcttcagtctggacaatgactgccatctgttggtaacttacagaaagtttagtgttctgccttcagtgacagcaccacagtttcccttactcctgtcagctaatggcttcctcccctggattctcagaccagtgtggccttcccagtgttagtcattcctcactgtgctcatgttttgtgggtgcacggcctttgagctttgggagaaaagaagatgaggctgtgacactggtggccctgtgtttgagataataattattgcttgtctctgaatttgatgaaaactgaagtacattctaaagaaagtatgtcttctattgtgttcccaaaccaagaacttgtcaataaattcatataaattgtggaattc

SEQ ID NO: 1163 - DNA, 2178 bp, Rattus norvegicus
cagagcggagctgcggccaggaggaggacgcggccatggggctgctgtcccaaggctcgccactgagctgggaagagacccagcgccacgccgaccacgtgcggagacacggcatcctccagttcctgcacatctaccacgcagtcaaggaccggcacaaggacgtgctcaagtggggtgacgaggtggagtacatgttggtgtcctttgatcatgaaaataggaaagtccagttgttactgaatggcggcgatgttcttgaaactctgcaagagaagggggagaggacaaaccccaaccacccaaccctctggagaccagagtatgggagttacatgattgaagggacacctggccagccgtacggaggaacgatgtccgagttcaacacagtggaggacaacatgaggaaacgccggaaggaggctacttctgtattaggagaacatcaggctctttgcacgataacttcatttcccaggctaggctgccctggattcacactgccagagcacagacccaacccagaggaaggaggtgcatctaagtccctcttctttccagacgaagccataaacaagcacccccgctttggtactctaacaagaaacatccggcatcggagaggagaaaaggttgtcatcaatgtgccaatattcaaggacaagaacacaccatctccgtttgtagaaacatttcctgaggatgaggaggcatcaaaggcctctaagccagaccacatctacatggatgccatgggatttgggatgggcaactgctgtcttcaggtgacattccaagcctgcagtatatctgaggcaagatacctttatgaccagttggccactatctgcccaattgttatggctttgagtgctgcatcgccattttaccgaggctacgtgtcagacattgattgtcgctggggagtgatttctgcatctgtagatgatagaacacgggaggagagaggactggagcccctgaagaacaatcgctttaaaatcagtaagtctcggtatgactcaatagatagctacctgtccaagtgtggagagaagtacaatgacatcgacctgaccatcgacacggagatctacgagcagctcttagaggaaggcatcgatcaccttctggcacagcacgttgctcatctctttattagagacccactgaccctttttgaagagaaaattcatctggatgatgccaacgagtctgaccattttgagaatattcagtccacaaactggcagacaatgaggtttaagcctcctcctccaaactcagatattggatggagagtagagttccgaccaatggaggtacagttgacagactttgagaactctgcctatgtggtatttgtggtactgctgaccagggtgatcctctcatacaaactagacttcctcattccactgtccaaggttgacgagaacatgaaagtggcacaggagcgagatgccgtcttacaggggatgttttatttcaggaaagacatttgcaaaggtggcaacgccgtggtggatgggtgtagcaaggcccagaccagctccgagccatctgcagaggagtacacgctcatgagcatagacaccatcatcaatgggaaggaaggcgtgtttcctggactcatccccattctgaactcctaccttgaaaacatggaagtcgacgtggacacccgatgcagtattctgaactacctgaagctaattaagaagagagcatctggagaactaatgactgttgccaggtggatgagagagtttattgcaaaccatcctgactacaagcaagacagtgtaataactgatgagatcaactatagcctcattttgaaatgcaatcaaattgcaaatgaattgtgtgaatgtccagagttacttggatcaggctttagaaaagcgaagtacagtggaggtaaaagcgacccttcagactagacatccagcaaagtggatggcagctgcagccctgaccccgagcccactcagacgctgtgaagaccaagatggcctacagtgttccagttgcccacaagtgactagaagcttccttcagtaggtgaatctgagtttgtatatgtatatactaaagtatttttatgattattaacaatgtattttaataacactgtatctacagtcatggtgaactggcttgtacattttt

SEQ ID NO: 1164 - DNA, 2296 bp, Rattus norvegicus
cctgcttgctcaggaactccctcagccgccgcgttctctagccgccgttgctgcccgggacgatgatgccgcgcctgctgtttcgtgcctggccccgctgcccctcgcttgtcctgggagcccctagtaggcccttaagtgctgtctcggggccggacgattatctgcagcacagcatcgtgcccaccatgcactaccaggacagcctgcccaggctgcctatccctaaacttgaagacaccatgaagagatacctcaatgcacagaagcctctcttggatgacagccagttcaggagaacagaagcgttgtgtaagaattttgagactggcgttgggaaggagctgcatgcccacctgcttgctcaggataagcagaataagcacaccagctacatctcaggcccctggttcgatatgtatttaactgctcgagactctatcgttttaaactttaatccatttatggcattcaatccggacccaaagtctgagtataatgaccagcttaccagggcaaccaacttgactgtttctgcagtccggtttctgaagacacttcaggctggccttttagaaccagaagtgttccacttgaacccttccaaaagtgacacagacgccttcaaaagactcattcgctttgttcctccctctctgtcctggtatggagcctacctggtcaacgcatatcccctggatatgtcccagtatttccggcttttcaattcaactcgtatacccagacccaatcgtgatgaactctttactgacaccaaggctagacacctcctggtcctaagaaaaggacatttctatgtctttgatgtcctcgatcaagatgggaacattgtgaatcccttagagattcaggcacatctaaagtacattctctcagacagcagccctgtgcccgagtttcctgtggcatatctgaccagtgagaaccgagatgtctgggcagagctcagacagaagttgatttttgatggcaatgaggaaaccctgaagaaagtggactctgctgtcttctgcctctgcctagatgacttcccgatgaaggatcttattcacttgtcacacaccatgctgcacggcgatggcacaaaccgctggtttgataagtcctttaacctcattgtagccgaggacggcactgctgcagtccacttcgagcactcgtggggggatggggtggcagtgcttaggtttttcaatgaagtgttcagagacagcactcagacccctgccatcactccccagagccagcctgccgccaccaactcctctgcgtctgtggagacgctcagcttcaacctcagcggtgctctcaaggctggcatcactgctgccaaggagaagttcgacaccacggtgaaaaccctcagcattgactccattcagttccagagaggtggcaaggagttcctgaagaagaagcagctgagccccgatgcggtggcccagctggccttccagatggccttcctgagacagtatggccagacggtggctacctatgagtcctgcagcactgcagccttcaagcacggccgcacagagactatccgcccagcctccatctttactaagagatgctccgaggcgtttgtcagggacccctccaagcacagtgtgggcgagcttcagcacatgatggctgagtgttccaaataccatggccagctgaccaaagaagcagcgatgggccagggctttgaccgacacttgtatgctctgcgctatctggcaacggccagaggactcaacctacctgagctctatctggatcctgcataccagcagatgaaccacaacatcctgtccaccagcactctgaacagcccagcagtgagccttgggggctttgcccctgtggtccctgatggctttggcattgcatatgctgttcacgatgactggataggctgcaatgtctcctcctactcaggacgcaatgcccgagagtttctccactgtgtccagaagtgcttggaagacattttcgatgctctagaaggcaaagccatcaaaacttagcttcctagtcgctgaaaagcctccattcttcctcatgaacatggatgttcatgtagctggaaggtgccatcttgtgcccaacaaaactaatcccaaggtgcttccacagccagtgctgcaggctgagctggaagagcccaactgaaggtagtgagaggtcgcagctgtaaagccctctttgttcaggagatagggtttggaaaactaactcagctgtatttattgtttaaatagaaataaaacctggtgttgcttag

SEQ ID NO: 1165 - DNA, 9852 bp, Rattus norvegicus
tggggtcacttccttcacacaggactttggcggaaatctctacacccgtgtctcgtcatccccttcgagagcattaactatttaaaaccaggagagaaagcgcacgccgagaggaggtgtgggtgttccgctcccatcctaacggaacgagctccctcttcgcggacatgggattgcccagcggctgctaacccctgtcctggtcctgatccctcaaaccggcgtggctccccggtcaccaaggagctgactacaaaggatttgcatccttggctgggagtccattggctacagagtgcctgacctgggtcaggcttttcaacaaggacatgtctgacaaaatgtctagtttcctacatatcggagacatttgttctctgtatgcagagggatctacgaatggatttatcagcaccttgggcttggttgatgaccgttgcgttgtacagccagaagctggggaccttaacaatccacccaagaaattcagagactgcctctttaagctatgtcctatgaatcgatattctgcacagaagcagttctggaaagctgctaagcccggggccaacagtacaacagatgcggtgctgctcaacaaattgcatcatgctgcagacttggaaaagaagcagaatgagacagaaaacaggaaattgctggggacggtcatccagtatggcaacgtgatccagctcctacatttgaaaagcaataaatacttaactgtgaataagaggcttcctgccctactggagaagaacgccatgagagtgacgttggatgaggctggaaatgaagggtcttggttttacattcagccgttctacaagctccgctccatcggagacagtgtggtcataggtgacaaggtagttttgaaccctgtcaatgctgggcagccgctacatgccagcagccatcagctggtggataacccgggctgcaatgaggtcaactccgtcaactgtaacacaagctggaaaatagtgcttttcatgaaatggagtgataacaaagatgacattctaaaaggaggtgatgtggtaagactcttccatgctgagcaagagaagtttctcacgtgcgatgagcacaggaagaagcagcacgtcttcctgaggacaaccggcagacagtcagccacgtcggccaccagctccaaagccctgtgggaagtggaggtagtccagcatgacccatgtcggggtggagctgggtactggaatagcctcttccggttcaagcacctggctacagggcattacttggcagcagaggtagaccctgactttgaggaagaatgcctggagtttcagccctcagtggaccctgatcaggacgcatctcggagcaggttgagaaatgcccaagaaaaaatggtgtactctctggtctctgtgcctgagggcaacgacatctcctccatctttgagctagaccccacaactctacgtggaggtgacagccttgtcccaaggaactcctatgtccggctcagacacctgtgtacaaacacctgggttcacagcacaaacatccccattgacaaggaagaggaaaaacctgtcatgctgaagattggtacctctcccctgaaggaggacaaggaagcttttgccatagtccccgtttctcctgctgaggttcgggacctggactttgccaatgatgccagcaaggtgctgggctccatcgctgggaagttggaaaagggcaccatcacccagaatgagagaaggtctgtcaccaagctgctggaagacttggtttactttgtcacgggtggaacgaactctggccaagacgtgcttgaagtagtcttctctaagcccaaccgagagcggcagaagctgatgagggaacagaatattctcaagcagatcttcaagcttttgcaggcccccttcacggactgcggggatggcccaatgcttcggctggaggagctgggggaccagcggcacgctcctttcagacacatttgccgactctgctacagggtcctgagacactcacagcaagactacaggaagaaccaggagtacatagccaagcagtttggcttcatgcagaagcagattggctatgatgtgctggccgaagacaccatcactgccctgctccacaacaaccgaaagctcctggaaaagcacatcaccgcagcagagattgacacgtttgtcagcctggtgcgaaagaacagggagcccaggttcttggattacctctctgacctctgtgtatccatgaataagtcaatccctgtgacccaggagctcatttgtaaagctgtgctgaatcccaccaatgctgacatcctgattgagaccaagttggttctttctcgttttgagtttgaaggcgtttccaccggagagaatgctctggaagctggggaagatgaggaagaggtgtggctgttctggagggacagcaacaaagagatccgtagcaagagtgttagggaattggcacaagatgctaaagagggacagaaggaagacagggatgtcctcagctactacaggtatcagctgaacctctttgcaaggatgtgtctggaccgccagtacctggccatcaatgaaatatccgggcagctggatgttgacctcatcctccgctgcatgtccgatgagaacctcccctatgacctcagagcatccttttgccgcctcatgcttcacatgcatgtggaccgagatccccaggagcaggtgacccctgtgaaatacgcccgtctgtggtcagaaattccctccgagatcgccattgacgactatgacagcagtggagcatcgaaggatgaaatcaaggagaggtttgctcagacgatggagtttgtggaggagtacctgagagatgtggtttgtcaaagattccccttttctgataaggagaaaaataagctcacatttgaggttgtgaacttagccaggaacctcatatactttggcttctacaacttttctgaccttctccgattaaccaagatcctcttggcaatcttagactgtgttcatgtgacaaccatcttccccattagcaagatgacgaaaggcgaagagaataaaggcagcaacgtgatgagatctatccatggagttggggagctcatgacccaggtggtgcttcggggaggaggctttttgcccatgactcctatggctgctgcccctgaaggaaatgtgaagcaggcagagccagagaaagaggatatcatggtcatggacaccaagttaaagatcattgaaatactccagtttattttgaatgtgagattggattataggatctcctgcctcctgtgtatatttaagcgggagtttgatgaaagcaattcccagtcatcagaaacatcctccggaaacagcagccaagaagggccaagtaatgtaccaggtgctcttgactttgaacacattgaagagcaagcagaaggcatctttgggggaagtgaggagaacacacctctggacttggatgatcatggtggcagaaccttcctcagggtcctgctccacttgacaatgcatgattacccacccctggtgtctggggccctgcagctcctcttccggcatttcagccagaggcaggaggtccttcaggccttcaaacaggttcaactgctggttactagccaagatgtggacaactacaaacagatcaagcaagacttggaccagctaagatccatcgtggagaagtctgagctctgggtatacaaaggccagggtcccgatgagcctatggacggagcctctggtgaaaacgaacataagaaaactgaggaggggaccagtaagccactgaagcacgaaagcaccagcagctacaactaccgagtggtgaaagagattctgattcgacttagcaagctctgtgttcaagagagcgcgtcggtgaggaagagcaggaagcagcagcagcgactgctgaggaacatgggtgcccatgctgtggtgctggagctgctgcagatcccctatgagaaggccgaagataccaagatgcaggagatcatgaggctggctcacgaatttctgcagaatttctgcgcaggcaaccagcagaaccaagctttgctacataaacacataaacctgtttctcaacccagggatcctggaagcagtgaccatgcagcacatcttcatgaacaacttccagctgtgcagtgagatcaacgagagagtggtccagcatttcgttcactgcatagagacccacggtcgaaatgtccagtatatcaagtttctccagactattgtcaaggccgaagggaaattcattaaaaagtgccaagacatggtcatggctgagcttgtcaattctggagaggacgtcctcgtgttctacaatgacagagcctctttccagactctgatccagatgatgcggtccgagcgtgaccggatggatgagaacagccctctcttcatgtaccacatccatctggtggagctcttggctgtgtgcacagagggcaagaatgtgtacacagagatcaagtgcaactccctgctcccgctcgatgacatcgttcgtgtggtcactcatgaagactgtatccccgaggttaagattgcttacatcaacttcctgaatcactgctatgtggacactgaggtggagatgaaggagatttacacaagtaatcacatgtggaagttgtttgagaatttcctcgtggacatctgcagggcctgtaacaacacaagtgacaggaagcatgcagactcggttctggagaagtacgtcactgaaatcgtgatgagcattgtcaccaccttcttcagctctcccttctcagaccagagtaccactctgcagactcgccagcctgtctttgtgcagctcctgcaaggcgtgttccgagtttaccactgcaactggttgatgccgagccagaaagcctcggtggagagctgtatccgcgtgctctctgacgtagccaagagccgggccatagccattcctgttgacctagacagccaagtcaacaacctcttcctgaagtcccacaacattgtgcagaaaacagccatgaactggcggttatcagcccgcaacgctgctcgtagagactctgtcctggcagcttccagagactaccgaaatattattgagaggttacaggacatcgtgtctgccctggaggaccgactcaggcccctggtccaggccgagctgtctgtgctcgtggatgttctacacagaccggaactgcttttccctgagaacacggatgccaggaggaaatgcgaaagtggaggtttcatctgcaagctcataaaacacaccaagcagctgctagaggagaatgaagagaaactgtgcattaaagtcttacagaccctcagggaaatgatgaccaaagatagaggctatggagaaaagcaaatttccattgatgaattggaaaatgccgagctgccacagccaccggaagctgagaactccacagaggagcttgaaccaagtccacccctgaggcaactggaagaccataaaaggggtgaggcactccggcaaattttggtcaaccgttactatggaaacatcagaccttcaggaagaagagagagccttaccagctttggcaatggtccactatcaccaggaggacccagcaagcctgggggaggagggggaggtcctgggtccggctccacaagccggggtgagatgagcctggctgaggttcaatgtcatctcgacaaggaaggcgcctccaatctggtcatcgacctcataatgaatgcatccagcgaccgagtattccacgaaagcattctcctggccatcgcacttctggaaggaggcaacaccactatccagcactcatttttctgccggctgacggaagataagaaatcagagaagttcttcaaggtcttttacgatcgaatgaaggtggcccagcaggaaatcaaggcgacagtgaccgtgaacaccagcgatttgggaaacaaaaagaaagatgatgaagtggaccgggatgccccatcccgaaagaaagccaaagagcccacaacacagataacagaagaggtccgggatcagctcttggaagcatctgctgccaccagaaaagcctttaccaccttccggagggaggccgaccctgatgaccattaccaatctggggagggcacccaggctacaacggacaaagccaaggatgacctagagatgagtgcagtcatcaccatcatgcagcctatcctgcgcttcctgcagctcctgtgtgaaaaccacaaccgcgatctgcagaatttccttcgttgccaaaataataagaccaactacaacttggtgtgtgagacactgcagtttctggactgtatctgtgggagcacaactggaggccttggtcttctcggactgtacataaatgaaaagaatgtagctcttatcaaccaaaccctggagagtctgactgagtactgtcaagggccttgccatgaaaaccagaactgcatcgccacccacgagtccaatggcatcgatatcatcacagccctcatccttaacgatatcaaccctctggggaagaaacggatggacctggtgttagaactgaagaacaatgcttcaaagctactcctggccatcatggaaagcagacacgatagtgaaaatgcagagaggatcctgtacaacatgaggcccaaggagctggtggaagtgatcaagaaggcctacatgcaaggcgaagtggagtttgaggatggggagaacggtgaggatggagcagcctcccccaggaacgtgggccataacatctacatcctcgctcaccagttggctcggcataacaaagaacttcaaaccatgctgaaacctggaggccaggtggatggcgatgaagctctggagttctatgcgaagcacacagcacaaattgagattgtcagactggaccgaactatggaacagattgtcttccctgtgcccagcatctgtgaatttctgactaaggaatcgaaacttcgaatatattacaccacagagagggatgagcaaggcagcaagatcaatgacttcttcctgcgctccgaggacctctttaatgagatgaactggcagaagaaacttcgagcccagcctgtcttgtactggtgcgcccgaaacatgtctttctggagcagcatctccttcaacctggccgtcctgatgaacctgctggtggcgtttttctacccatttaaaggagtgagaggaggaacactagagccgcactggtccggcctcctgtggacagccatgctcatctctctggcaattgtcattgcgctgcccaagccccatggcatccgggccttaattgcttctacaatcctacgactgatattttcagttggattacagcccacactgtttctgctgggagctttcaatgtctgcaataaaatcatcttcctgatgagctttgtgggcaactgtgggaccttcaccagaggctaccgagccatggttctggacgttgagttcctctatcatttgctgtatctactgatctgtgccatgggcctcttcgtacatgagtttttctatagtttgctgctttttgatttagtgtacagagaggagactttgcttaatgtcattaaaagtgtcacccgcaatggacggcccatcatcttgacagcggccctggctctgattctggtttacctgttctcaattgtgggctacctgttcttcaaggatgactttatcttggaagtagacaggttgcccaatgagacagctggtccagaaactggtgagagtttggccaacgatttcctgtactctgatgtgtgccgggtagagacgggggagaactgcacctctccggcacccaaagaagagctgctccctgtggaagaaacggaacaggataaggagcacacgtgtgagacactgctcatgtgcatcgtcaccgttctgagtcacgggctgcggagtgggggcggagtaggagatgtgctcaggaagccatccaaagaggagcctctgtttgctgcaagggtgatctatgacctcctcttcttcttcatggtcatcatcattgtcctgaacctcatttttggggtcatcatcgacacctttgctgacctgaggagtgagaagcagaagaaggaagagatcttaaaaaccacgtgcttcatttgtggcttggaaagggacaagtttgacaataagaccgtcacctttgaagagcacattaaggaagaacacaacatgtggcactatctgtgcttcatcgtgctggtgaaagtgaaggactccaccgagtacaccgggcccgagagctacgtggcagagatgatcagggaaagaaaccttgattggttccccaggatgagagccatgtccctggtcagcagtgactctgaaggggaacagaacgagctgaggaacctgcaggagaagctggagtccaccatgaagctggtcaccaatctttctggccagctgtcagaactaaaggaccagatgacagaacaaaggaagcagaaacaaagaattggccttctaggacatcctcctcacatgaatgtcaacccacagcagccagcctaagcaaatgagacggagggactgtactcaaccctttttaaattattgtcagcgtgggtctggctcttggttctgatctgccctctaaggttacatgtgcgcttagtacatttgtaaatactcggttttgtattgtatgtatatgattgcaattctcagaggtttggactttcgtattgtaattagctctgttggcatggtgacttgtcactcctgccaaaaatattaaaaatgccttttttggaaggactacagaaagtacctgatttgcacttgaaccagattatagatttaaaaagtatttgacatgtattttgttatttaaaactagaatagccagtatttatgttttttataaaactgtgcaatacaaattatgcaatcaccataactctgtaactcctgagtgtcttaagggagtgcgcatctttgaagctgatctgttaatacttatgtaataaatggttaaatatcaaatgatgatgctgctgccaaaattatattaatagcaagtttctggcccctgggcaattttgtaccttgtaattatcctatggtgatgctgtttctcgttgctaatggcattagtgcctcgtatcctagtgataactccaggtctgtgaaccattcaaacaacattcatttttgagacaaagcaactttagtttcaagggtaattttaagcttcaaaattaatcatttaaagtatttctttaagagagccatgttagaggctcacacgttagcttgaaaggagtcgatgaaataatttttttaaagggaactttttacacgacgtttggaataacagcatattgctgaccagtcagtgtcatctcccaggtgaattttgatgtcacgttatagtcaaatgagctagcttatggtttctagattctcttcatctgaaccaacatgatgcagtaggtgagaagttattatgcatatatacacatatacatccatataaggcaaagtaggagctgtccccttaggatgcatagctgcccccttagggtgcagagctcaacactgacagtgctgttctgagagagccacgtttgggttttatttctttgtcacatgatttcttttctggatgtgtgcaagtataacaggaagtgttttctacctgttgcttgttttgtacctgggtctcgttttactagaccatctctgcacaaaagtttaaaaaatgaaccgtaagcagagttctgaagcaagtcaagtttgtaagtgcatacctgaaattatttaataaatgacgcagaatact

SEQ ID NO: 1166 - DNA, 3332 bp, Rattus norvegicus
tcagaggcaagctccacacaggctctttccacagccagtcacagccgccaaccagtctttggtgacagtcttcttgctgcctgggcccaccggctccctcagactctcctgcctccgctgtcagcgggtcacgacgtcattccggtcgcctgcgcaccttcgctgctgggagcgcgacgcaggcgcattgactgagtttccccgggagatccctgagcacgtgggttgtgctgtcccgtacgcgcgcggagggactggaacctgaattttgctggtgttcttcgtgggtagcagactagaagggccatggcaccagcgggaatcctgaacgggaaagtggtctccgcgcaaatcaggaatcgactgaagacccaggttactcagatgcaggagcaggtacctggcttcacccctggcctggcaatcctgcaggttggcgacagagatgattccaatctttatataaatgtgaagctgaaggctgctcaagagatcgggatcaaagccactcacattaaattaccaagaacttccacagagtcggaggtgttaaaatacgtcatctccctgaatgaggatgccactgtgcacggattcatagtacagctgcctttagactccgagaattccattaacacagaggcagtcatcaatgccattgcccctgagaaggatgtggacgggttgacgagcatcaatgccgggaagcttgccagaggtgatctaaaggactgcttcattccgtgcacacccaaaggatgcttggaactcatcaaagagacaggagtgcagattgcaggaaggcacgccgtggtggtcgggcgaagtaaaatagttggtgcacccatgcacgacctgcttctgtggaacaatgccacggtgaccacctgccactccaagactgccgatctggacaaggaggtaaataaaggagacattctggtggttgcaacaggacagcctgagatggtgaaaggggagtggatcaagcctggagctgtggtcatagactgtgggatcaattatgttccagatgatacaaaaccaaatggaaggaaagttgtgggtgacgtagcatatgacgaggccaaggagaaggcgagctttatcacgcctgtccccggtggcgtggggcccatgaccgtggcaatgctgatgcagagcacagtagagagcgcacagcgcttcctgaagaaatttaagccagggaagtggacaattcagtataacaagctgaacctcaagacgcctgtaccaagtgacattgctatatcacgatcttgcaaacccaagctcatcggtaacctggcccgagaaattgggctactcactgaggaggtggaattgtatggagaaacaaaggccaaggtcttactgtcagcactagatcgcctgaagcatcagccagatgggaaatacgttgtggtgactggaattactccaacacccctgggagaagggaagagcacaaccaccatcgggcttgtgcaagcccttggcgcccacctgcatcagaatgtttttgcgtgtgtgcgacagccttctcagggccccacctttgggataaaaggtggcgctgcaggaggcggctattcccaggtcattcctatggaagagtttaatctccacctcactggtgacatccacgccatcactgccgctaataaccttgtggctgctgctattgacgctcggatatttcatgagctgacccagacagacaaggctctctttaatcgtctggtaccctcagtaaatggagtaagaaagttctctgacatccaaatccgcaggttacggaggctaggcattgagaagactgaccccgctgcgctgacagatgatgagataaacagatttgcaagactagatattgatccagaaaccataacatggcagagagtgctggatactaacgatagattcctgaggaagatcaccattggacaggctccaaccgagaaaggccacacacgcacggcccagtttgatatctctgtggccagtgaaatcatggcagtcctggccctcactagttctctggaagacatgagagcaaggctgggcaaaatggtggtagcgtccagtaagaaaggggagcctatcagctgtgaagacctgggcgtgagcggggcgctgacggtgctcatgaaggatgcgatcaagcccaatctcatgcagaccttagagggcacgccggtatttgtccatgctgggccttttgccaacattgcacatgggaattcctccatcattgcagaccggattgcactcaagctggttggccctgagggctttgtagtgacagaagcaggattcggagcagacataggaatggaaaagttcttcaacatcaagtgccggtattctggtctccagcctcatgtggtggttcttgttgccactgtcagggctcttaagatgcacgggggtggccccacggtcaccgctggactgcctcttcccaaggcttacacagaagaggacctggacctggtggaaaagggcttcagtaacttgaggaaacagatagaaaatgctagaatgtttggagtgcctgtcgtggtggccatgaatgcattcaagacagatacagatactgagctggacctcatcggccgcctctccagagagcatggggctttcgatgctgtcaagtgcacccactgggcagaagggggccagggagccttagccctggctcaggctgtccagagagcttcacaggcccccagcagcttccagctcctctatgacctcaagctctcagttgaagataaaatcaggattattgcacagaagatctacggggccgatgacatcgaattgctccctgaagcacaaaacaaagcagaaatctacacaaagcagggctttgggaatctacccatctgcatggccaaaacacacttgtctttatctcacaacccagagcaaaaaggggtgcctactggcttcgttctgcccatccgggacatccgggccagcgttggggctggtttcctgtaccctttagtaggaacgatgagcacaatgcctggactccctactcgaccctgtttttatgatatcgatttggaccctgaaactgaacaagtgaatggattgttttaaacagatcttccatctccaagaggctactctgtctggccagtgtctgttcaggcccactgaggaagtgtgcagagaagtcttgaaagtctgtgcctgccctgaagagcttcagaaatagtggaagtttctctaaagcctttcatagccttaattcagatcatgtataaattaacataaatcatgcctatttacatagtaaaagtccacagaataaatga

SEQ ID NO: 1167 - DNA, 619 bp, Rattus norvegicus
gcggccatggagcccgacaacagtccacggaagatccagtttacggttccgctgctggagcctcacctggacccggaggcagccgagcagattcggaggcgccgccccacccctgccacacttgtgctgaccagcgaccagtcatccccagaagtagatgaagaccggatccccaacccacttctcaagtccacactgtcaatgtctccacggcaacggaagaagatgacaaggactacacccaccatgaaagagctccagacaatggttgaacatcacctagggcaacagaaacaaggggaagaacctgagggagccactgagagcacagggaaccaggagtcctgcccacctgggatcccagacacaggctcagcgtcaaggccagatacctcggggacagcacaaaagcctgcagaatccaaacccaagactcaggagcagcgtggtgtggagcccagcacagaggacctttcagcccacatgctaccactggattcccaaggagccagcttggtctgacagaagttgacatccggggatcgccagtgagtgtggaagttcatggacactggatgtttcttaatctcttgtttttaaacgtgataaatttggtgtt

SEQ ID NO: 1168 - DNA, 819 bp, Rattus norvegicus
gccacgactctcgctagacagtgaagcacagttgctgctatgtctgggaagccagtgcttcactacttcaatgcccggggcagaatggagtgcatccggtggctcctggctgcagcaggagtggagtttgaagagaagcttatacagagtccagaagacttggaaaagctaaagaaagacgggaatttgatgtttgaccaagtgcccatggtggagattgacgggatgaagctggcacagaccagagccattctcaactacatcgccaccaaatatgacctctatgggaaggacatgaaggagagagccctgattgacatgtattcagagggtattttagatctgactgaaatgattatccaattggtaatatgtcccccagaccaaagagaagccaagaccgccttggcaaaagacaggaccaaaaaccggtacttgcctgcctttgaaaaggtgttgaagagccatggccaagactaccttgtaggtaacaggctgacccgggtagacatccacctgctggaacttctcctctatgttgaagagtttgatgccagccttctgacctctttccctctgctgaaggccttcaagagcagaatcagcagcctccccaatgtgaagaagttcctgcagcctggcagtcagagaaagccagccatggatgcaaaacaaatcgaagaagcaaggaaggttttcaagttttagcggagctgcactgtccaatttcttgtaatccaggctctgatgttttgcaaaaaatgagaagcaattgttgatcctggctattttgcaataataaaaaaatgaacaaatggt

SEQ ID NO: 1169 - DNA, 2528 bp, Rattus norvegicus
gctcctccccaacacgcaggccggagggtgacgtcatccacgtccacgccttacgtccaagggcctgtcgtaagtgtcgggcaaacgaggcctctagaggaagggcgccctctcggtacaacctaccatgctagcccgcatgcgcgcgcaccttgctagcgctcccaatcctggagccaatgacatgcggctacgtcacggcgcagtgcccggcgctgccgcacgtccggccgcgggagggcagaacaagtgtggttgcattgacaccggtacataggcgcgggccggcgtgtccttgggctagagagcgggacgtctccctaagagtctgatcctttgtggtgttgaccagcccggaccggtgagcgcgcgacggggacgcggggcggaagagggcgaggagaccgaggcaggcctgacctacaaagacatgcggaactgtggaggctccgtgggtgaagggctggggccagagttctagagggagcttgcccgccgcaccttctgagagcagaagctgctgtttcttaagaactgggctggttctttttctgattaagtttctggaaaggtgggtttcttcagtcccctttggatgacctcgtggttacccctgggatctcagaacgcgtagagtgagaaggttccttcccttgccttcccgggccggactaatgcaagagtgacttaacctccaaatgagaccagagcaggaggaggaagcacttaggatcttcagcccccgagccccattgatgtattttcccttatctttggaagtgactttaaatgacagcacagacagcaattaagcattctgaaatgctaagaggtatagtggttttggcttaacaaaattgtagtctagtttcatatttgactttttgaccttgccttcttcagaaactgaagcttgaactgtgggtttccatttcccttccttgggcatgagcctgtcttgaaagtttgctttaatcctaaataacgcgcttgctgttgaaggatattgcaaacagactgagttattagatagcatccagcctggtggtagtattgtaaagggttggtacttaagtgatttgagtggtcattgggatccatagtatgttttgctgtaacaagtgacttgaaccgttgggtctttttcatttctagaatttaaaatgggtgatgttgaaaaaggcaagaagatttttgttcaaaagtgtgcccagtgccacactgtggaaaaaggaggcaagcataagactggaccaaacctccatggtctgtttgggcggaagacaggccaggctgctggattctcttacacagatgccaacaagaacaaaggtaagtgtggagctgctgttcagacagagcacaggttgcatgggtgtaaccaatgcagacttatcaggtataaaacatttaactgctgcatctctttctgtgtaggtatcacctggggagaggataccctgatggagtatttggaaaatcccaaaaagtacatccctggaacaaaaatgatcttcgctggaattaagaagaagggagaaagggcagacctaatagcttatcttaaaaaggctactaatgaataattccactgccttatttattacaaaacaaatgtctcatggcttttaatgtataccataatttaattcatacaccaaattcagatcatgaatggctaacaatgtttttgttggacagccccgatttaagtaaaattgacttgtcataaagtggatatgatcttttttaaagtaacacttccaattgaatacatgttatcactgctttccctttctcaagataagattggacttaattagtaatattttcctttccataaataggagggtgtcgcctcaaacctattgaatggttttatacttagatttatataactgggtatatgaatatgttcaaatcctgggaaaattctgtcactgtctgagaaacaagaagactcacccgtgcttcagtgtgtgtaaactggcctctgacaggcaatgctaaacaccaggacggaactattcttgacagtgctgttttaattagaattccctacatcaatgatgctgcctttcaccactgaaaggcatttactgtggtttatgtatgatatcaaataaagagtatttaacacttctttatagttgatctacaagttaaaatgcttttaagaacaagttaggccttttaaatcttctcttatctaagactaagctgtaattcagaattgtccttaaatgcccattcggaaagtcataactggaatttctgttcatgcctgattgggagtggtactcttttctaacttactagatggaaagatgaaaataaaggagataatttgtaagttatcaacagtcagaagataattaaatcaatcacaaatcatgatcttttgattgtgctttaatgatggttggcaaaacttaagctgtttaaactttccctagtaaaaccgtggtctagtgaaagcactggttgatattaccttgatacggggacaactcagactagagcaacac

SEQ ID NO: 1170 - DNA, 959 bp, Rattus norvegicus
agagggagcagctttttaacaagagaactcaagcaattgctgccatgccggggaagccagtccttcactacttcgatggcagggggagaatggagcccatccggtggctcctggctgcagctggagtagagtttgaagaacaatttctgaaaactcgggatgacctggccaggctaaggaatgatgggagtttgatgttccagcaagtgcccatggtggagattgatgggatgaagctggtgcagaccagagccattctcaactacattgccaccaaatacaacctctatgggaaggacatgaaggagagagccctcatcgacatgtatgcagaaggagtggcggatctggatgaaatagttctccattacccttacattccccctggggagaaagaggcaagtcttgccaaaatcaaggacaaagcaaggaaccgttactttcctgcctttgaaaaggtgttgaagagccatggacaagattatctcgttggcaataggctgagcagggctgatgtttacctagttcaagttctctaccatgtggaagagctggaccccagcgctttggccaacttccctctgctgaaggccctgagaaccagagtcagcaacctccccacagtgaagaagtttcttcagcctggcagccagaggaagccattagaggatgagaaatgtgtagaatctgcagttaagatcttcagttaattcaggcatctatggatacactgtacccacaaagccagccttcgaaagctttgcaacaatcgcatattttgactaaatgttgaccctacttattgggaggccaacacgttttctaatgcttctgtgttaattcatatagacatgactgatgaggaattgctgggatgctatttggttgtagttaaaatttgaaatcatgatcacttcctcagatattactttgaatctcaataaaaacttcgcaagctt

SEQ ID NO: 1171 - DNA, 1389 bp, Rattus norvegicus
tgctcctctgctccaggctcctgccaagtttagcgcaggaagaaggcgcccaggaattgaactgcaatgatgagactgtatttcaggctgtggatactgctctgaagaaatataacgctgagttagaaagcggcaaccagtttgtgttgtaccgagtgactgagggcactaagaaggatggcgctgaaacattgtattccttcaagtatcaaatcaaggagggcaactgctctgttcagagtggcctcacctggcaggactgtgacttcaaggacgctgaggaagccgctactggcgaatgcacaacaactttggggaagaaagaaaataaattctccgtagccacccagatctgcaatattactccaggtaagggtcctaagaagacagaggaggacctctgtgtcgggtgtttccaacccataccgatggatagctcagacctgaagcctgttctgaaacacgctgtggagcatttcaacaacaacacgaagcacacccacctctttgctctcagagaagtaaagagtgcccactcacaggtggtggctggcatgaattataaaattatctactccattgtgcaaacaaattgttcaaaggaggattttccttccctccatgaagactgtgtaccccttccctatggcgatcatggtgagtgtacgggtcatacccacgtggatattcataacacaattgccggcttctcacagagctgtgacctttatccaggagatgatttgtttgaactacttcccaagaattgccgtggctgccccagggagatacctgtagacagcccggagctgaaggaggcacttggtcattccattgcgagacttaatgcacagcataaccatattttctatttcaagattgacaccgtgaaaaaggcaacatcacaggtggttgctggagtaatatatgtgattgagttcatagccagagaaactaactgttccaagcaaagtaaaacagaactgacagcggattgtgagaccaaacacctcggtcaaagcctcaactgcaatgctaacgtgtacatgagaccttgggagaacaaagtcgtcccgactgtcagatgccaagcactagatatgatgatttctaggcctccaggattttcacctttccggctggtgcgagtacaagaaactaaagaaggaacgactaggctcctaaactcatgtgagtacaagggcagactctcaaaggcaggggcaggcccagcacctgagcgtcaggcagaagcttcaaccgtgacaccatagcccggcaaagacccggagtggaaggaccagaagactcctgggatgtgtgcagcatggaagcatgtttcttcatcacctgatcctgggtgaaataaagttcagactcgacgagttc

SEQ ID NO: 1172 - DNA, 2639 bp, Rattus norvegicus
gaatgctggcagtgtgggtgctatgtaaaagtatttacatagctttgtagagtgagccaagcccagtctgtttgggatgactcttcacagtgcctcgaatctgtcacacgtcttagtaagcagagtcacagagtttctgtcacatcatcctcctgcctacagggaagtaggccatgtccctgccccctactctgagcccagctgtgggagccagccctgcccaatgggctctctctgattgacttctcactcacttctaaactccagtgagcaacttctctcggctcgttcaattggcgtgaaggtctgtgtcttgcagagaaggttcttcacaactgggataaaggtctcgctgctcaagtgtagcccagtagaactgccaagccccttcccctcctctccctagactcttggatgcaagaagaatccaggcagctccaagggtgattgtgtccaacctagaatgtcttgaaaaagacattaaggggactagagaagacaggggatccaacggttctctgcagcccagcctgactgacatgtaactcttctggttctcaccagccagctggacctgcttagtattctttctgcctcagtttcccagcctgtacccagggctgtcatagttccatttcaggcagtagtaatgaatgagctgacataaaacatttagagcaggggtcagtatgtatatagagtgattattctatatcaggcattgcctcctcggaatgaagcttacaatcacccctccctctgcagttcatcttggggtggccagaggatccagcagacacctagtggggtaacacaccccagccaactcggctgttgcagactttgtctagaagtttcacgtctcagagctgaattcccttctcatgacctttggccgtgggagtgacacctcacagctgtggtgttttgacaaccagcagccactggcacacaaaatgtgcagccagcagcatatgaagtccaagaggcgtcccggccagccctgtccttgacccccacctgacaattaaggcaagagcctatagtttgcatcagcaacagtcacggtcaaagtttagtcaatcaaacgttgtgtaaggactcaactatggctgacacgggggcctgaggcctcccaacattcattaacaacagcaagttcaatcattatctccccaaagtttattgtgttaggtcagttccaaaccgtgctgaccatggctatgatccaaaggccggccccttacgtcagaggcgagcctccaggtccagctgaggggcagggctgtcctcccttctgtatactatttaaagcgaggagggctagctaccaagcacggttggccttccctctgggaacacacccttggccaacaggggaaatccggcgagacgctctgagatctctgatccagaccttccaaaaggaggaagaaaggtaggcagggccattccactctcctctccaaaagtaccactgaggggtccactcacagtctttgccctgacaaccaaggccctctagccatgtgcaactcatgcaaagtctacagaaggaacgggaagggcccatgggtgccggtgttcaagagcctctctttttgtttcaggtggcaccagagtccctgcctctctccacaccattgcaagaatgcctcctcagctgcataatggtctggacttctctgccaaggtcatccagggcagcctcgacagcctgccccaggaagtgaggaagtttgtggaaggcaatgcccagctgtgccagccagagtatattcacatctgcgacggctccgaggaggagtacgggcggctgctggcccacatgcaggaggagggtgtcatccgcaagctgaagaaatatgacaactggtgagtcccttcagcccaaagtctctgcctacaggctccccagctctaccttctcggagtctggagaataaagacccttgcagtagcaaacgcctgagaagcttaggagatcagtcagaatccagacaccctgtgaggttagcatagccagcttctagattccagatagccatgcaaggcggcccctttccctagggccagctcatggcttagcaaatgtctacctggtcaagttcccgttggcttggcttccatacctaagtaacacggtcaacgtccttgtgtctgcaaggccgggaagagcctgaggtaggcaagagaggtacatccccaagggtaccttgctgaaggcatccctgtgactttttcagttggctggctctcactgaccccagggatgtggccaggatcgaaagcaagacggtcatcattacccaagagcagagagacaccgtgcccatccccaaaagtgggcagagccagctgggccgctggatgtcagaagaggacttcgagaaagcattcaacgccaggttcccggggtgcatgaaaggtgggtgaggccagaccccaggcctgacagtgtgctgtgtgcacgttcacgctcccggtagtagcttaagctgcaaagggtggcccgcgtgcgaagctccgcgtctggttctgtctcacggaatatcaaattgttctctgagagtacgggtggctccgacctgtcatctcagacatggaagctgaggcaggggcattcaaagtttaaggcc

SEQ ID NO: 1173 - DNA, 3097 bp, Rattus norvegicus
ggtgcaggataccttgagaaaatggctgagtatctgaggctgccccactccctggcgatgatccgcctctgcaacccgccagtcaacgccgtcagtccaactgtaatcagggaagtaagaaatggactccagaaagctggatcagaccacacggttaaagccattgtgatctgtggcgcaaacggaaacttctgtgcaggtgctgatatccatggctttagtgcttttacccctggccttgcattaggaagcttggtagatgaaatacagagataccagaagccggtgttggccgctatccaaggtgtggctctcggaggaggactggagctggccttgggctgtcactatcggattgccaatgcaaaggctcgtgtcggcttgccagaagtcacactggggattcttcctggtgcaagaggaacccagcttctccccagggtcgttggagttcctgttgctcttgacctaattacctcaggaaaatatctttcagcagatgaagcactcaggcttggaattctggatgcagtcgtgaagtcagacccagttgaagaagccatcaaatttgctcagaagattatagataaacccatagaaccccgcaggatctttaacaagccagttccaagcttgcccaacatggacagtgtttttgcagaagccatcgccaaggtacgaaaacagtaccctggtgtcctggctccggagacgtgtgtccgctcaatccaggcctctgtgaagcatccctacgaagtaggcatcaaggaagaggaaaagctgtttatgtacctccgggcatccgggcaggctaaagccctacagtatgccttctttgctgaaaagtctgcaaataagtggtcaactccctcaggagcgtcttggaaaacagcctctgctcaacccgtctcctcagttggcgttcttggcttgggaacgatgggccgaggcatcgccatttcttttgcgagagtggggatctctgtggttgctgtggagtcagacccaaagcagctagatgctgcaaagaagataatcactttcaccttggagaaggaagcatccagagcgcatcagaacggccaagcttcggcaaaaccaaaactcaggttctcctcatccacaaaggaactttcaactgtggatttggtggttgaagcagtgttcgaagacatgaacctgaagaaaaaggtctttgctgagctgtcagccctgtgcaagccaggagcctttctgtgcaccaatacctcggcgctgaacgtggacgacattgcttcttccacagatcgccctcagctggtgattggcacccacttcttctcaccagcccatgtcatgaggttgctagaggtcattcctagccgatactcttcccctactaccatcgccacggttatgagcttgtccaaaaagatcggaaagattggagtagtggttggcaactgctatggatttgttgggaatcggatgttggctccctattacaaccaggggtttttcttgttagaggaaggtagcaagccagaggatgtagacggggtcttggaagagtttggttttaaaatgggacccttcagagtgtcagacctcgcagggctagatgtgggttggaaaattcgcaaggggcaaggccttactggaccatcattgccaccagggacccccgtccgaaagaggggcaacagcaggtactccccacttggcgatatgctctgtgaagctgggcggtttggtcagaagacaggtaaaggctggtatcagtatgacaagccactgggtcgcatccacaaacctgatccctggctttctacgttcctgtcacaatatagagaggttcaccacatcgagcagcgcaccatcagcaaggaggagatcctggagcgttgcttatattccctcatcaatgaggcgttccgcatcttggaggaggggatggctgctcgcccagagcacattgatgtcatctacttgcacgggtacgggtggccaaggcacaagggcgggcccatgttctatgctgcctcagttgggttgcccacagttctagagaaactgcagaaatattacaggcagaaccctgacatcccccagctggagcccagtgactacctcagaaggctggtagcccagggaagccctcctctgaaggaatggcaaagcttggcagggccccacggcagcaaactgtgattcagccttctgcgttttgccacgtatgttggcacctaatttcagtatgattccttcctaaaatccaaacagatcgctctgaagtacaaatcatgattgctgctgctgctgctgctgatagctggtcagtaaaagctcctctccgtatctttctacctcataattccaatggtcagacttcaggaatgtctacagttagtctatacctctgactgcacttctatcggaaaaattcaacgaatgtatgtttactactacaagcattcttctcttttgactgtttgcccactctaacaaaaacgtatacaaaatgttgctaatagaataattcacacctccagttgacaacccaaatggccttagcagatcaacacaggtggcatatacacgcacttgacacattccagctgtgtgaagttactgccacctgttgtaacatggtgctgggttagagcactgttctgagtgaggggaggcaggcagagaaggcaggcagataaggccacacatcatatggatgtggatataaaattccaggatatgcaggtctgtggacaacatagatgagtagcccaaggctgtaactgttcatacatgcatatattttttggtccttttttttttcggagctggggaccgaacccagggccttgcgcttcctaggtaagcgctctaaccactgagctaaatccccagccccgaggctgtaactgttagaggttaaaaatcactactgattagtacagagtatctttgggagctgataaaattttctaaaattactctagtggtggatctgtaacacattgagttcaatggttcaaagtgaattatattttatatatatatatatatatatatatatatacatatatatatagtctatctcaataaagttaataaaatt

SEQ ID NO: 1174 - DNA, 534 bp, Rattus norvegicus
agatggcggacattcagacggagcgtgcttaccaaaagcagcctacaatctttcaaaacaagaaacgtgttttgctgggagaaactggcaaggaaaaactccctcggtactacaaaaacatcggtctaggcttcaagacgcccaaggaggccatcgagggcacctacatagacaagaaatgccccttcactggtaatgtctccatccgaggacggatcctgtctggtgttgtgacgaagatgaagatgcagaggaccattgtcatccgccgggactatctccattatatccgaaagtacaaccgctttgagaagcgtcacaagaacatgtctgtgcacctgtccccctgtttcagggacgtccagattggcgacattgtcactgttggagagtgcaggcctctgagcaagactgttcgattcaatgtgctcaaggtcaccaaggctgctggcaccaagaagcagttccagaagttctgaggggggactgtagccaatgctctagaacaaataaaagttattttccaacttacag

SEQ ID NO: 1175 - DNA, 551 bp, Rattus norvegicus
gcgccttccagccgtcgggtacatggagccttggtccatgaatgctggctcacagccattctaagacctgtccttgcttgtcttggcgtacaccgaggcatcttgtcgtacaacacctactctctctgactgtcccataaacccagtgtgctgccacacccaacaagtgagaggacaggttacggactgagtatcctgtcttttcctcaggtcattgcctacaactgaacgtcttcctgagtccagtggcctccccaagatggtgcttagctctgcaataagatctgaagtaagcgagaaggagttagggctggggttatcgctcagcggcagaacactttctaatatgtgcgaagcctgggttccatccctaatactgcagcgggggcaggggagtgctgctggtgtctctctgctctttctccagtatctggggcaaaggtggttaatgaaaaacagctctgagactgagccagatacagaaaggcaaataaaactcaatgtgttatcatactgtgtgttcgcgttggtaattaagcccctacaggaaa

SEQ ID NO: 1176 - DNA, 1330 bp, Rattus norvegicus
gggactctctcatgccgccatacggagatggctgttttgggtgcccctggtgtgctctgtgacaatggagcaactgcagagagacctaccctggaccaccactgggatctctggaagaaaactcgcatgagaaggaatacagatcagaatgaagaagacgtacgacgtctcatctgggaaaagaatctcaagtttataatgcttcacaatctggaacattctatgggaatgcattcatacagtgtgggcatgaaccacatgggagacatgacacctgaagaagtcataggttatatgggctctctgagaattcccaggccctggaatagaagtggcactctcaagtcaagctctaatcagacattgcccgactctgtggactggcgagaaaagggctgcgtcactaatgtgaaataccagggctcttgtggttcctgctgggctttcagcgccgagggggcccttgaagggcagctgaagctgaaaacggggaagctggtgtctctcagtgctcagaacctggtggattgctcaaccgaagaaaagtacgggaataaaggctgcgggggtggcttcatgaccgaagctttccagtacatcatcgatacgagcatcgactcagaagcttcctatccctacaaagccatggatgaaaagtgtctctatgacccaaaaaatcgagctgccacgtgttcaaggtacattgagctccccttcggcgatgaagaagctctgaaagaagcagtggccactaaagggcctgtctctgtgggcatcgacgacgccagccattcctccttcttcctctaccaaagtggtgtctatgatgacccctcctgtaccgagaatatgaatcatggtgttctcgtggttggctatgggactcttgatgggaaagactactggcttgtgaaaaacagttggggccttcactttggtgatcaaggatatattcggatggcgagaaataacaaaaatcactgcgggattgctagctattgctcttacccagaaatctaaaccgtttcttctttttctaatgggtcacaaagacggaatacactctaatttaattttgtctgctccatccggaggacccaagtgtgtcgtgatcagtgtgtacatactgtgctaactggcttacagcttgtttgttttataactttacctctctctgaaaagtctgtaagcaaggacgcgctgaggatggagctggcagtctgtcctagatattctttctatgcttgcaccctgtcgtctaatgtgtctaataaccctttgtaacacagatatccccaaagtgcctaataaaatctgtcatttcaagctc

SEQ ID NO: 1177 - DNA, 8806 bp, Rattus norvegicus
ccggatcgtccaagtcgccgggctgcgaggtggcactgcgctcctttccgcccagcgcgcctcagtcctctgcaccgagcctggcagctcgcttctgggcgactttgccgcctcgagccccggaggccaaagccatgaatgaaatgtccagctttcttcacatcggggacattgtgtccctgtacgccgagggctctgtcaacggcttcatcagcactttggggctggtggatgaccgttgtgtggtggagcctgcagctggggacctggacaacccccccaagaagttccgagattgcctcttcaaagtgtgccccatgaaccgctactccgcacagaagcagtactggaaagccaagcagactaagcaggacaaagagaagatcgccgatgtggtgttgctgcagaagctgcagcatgcagcccagatggagcagaagcaaaacgacacagagaacaagaaggtgcacggggacgtggtgaagtacggcagcgtgattcagcttctgcacatgaagagcaacaaatacttaacggtgaacaagcggctgccggccctgctggagaagaacgccatgcgggtgacgctggacgcgacgggcaacgagggctcctggctcttcatccagcccttctggaagcttcggagcaatggggataacgtggttgtgggggacaaggtgatcctgaaccctgtcaacgcagggcagcctctacacgccagcaactatgagcttagtgataacgttggctgcaaggaggtcaactctgtcaactgcaacaccagctggaagatcaacttattcatgcagttccgggaccatctggaggaggtgttgaaggggggagacgtggtgcggctgttccatgcagagcaggagaagttcctgacctgtgacgagtaccggggcaagcttcaggtgttcctgaggaccacgctgcgtcagtccgccacctcggccaccagctccaacgcgctctgggaggtggaggtggtccaccatgacccctgccgcggcggagcgggacactggaatggtctgtacaggttcaagcacctggccacgggcaactatctggcggctgaggaaaaccccagctacaagggtgatgtctcagatcctaaggcagcaggaccaggggcccagagccgcacaggccgcagaaacgccggcgagaagatcaagtaccgtctggtggctgtgccacatggcaacgacatcgcgtctctcttcgagctggaccccaccacgctgcagaaaaccgactccttcgtgccccggaactcctacgtgcggctgcggcacctctgtaccaacacctggatccagagcacgaacgcgcccatcgacgtggaggaggaacggcctatccggctcatgttgggcacgtgccccaccaaggaggacaaggaggcctttgccattgtgtcggttcccgtgtctgagatccgcgacctggactttgccaacgatgcaagctccatgctggccagcgctgtggagaaactcaacgagggcttcatcagccagaacgaccgcaggtttgtcatccagctgttggaggacttggtgttttttgtcagcgatgttcccaacaatgggcagaatgtcctggacatcatggtcaccaaacccaaccgagagcggcagaagctgatgcgggacgagaacatacttaagcagatctttggcatcctgaaggctccattccgtgacaaggggggtgaagggccattggtgcgtctggaggaactgtctgaccagaagaacgccccctaccagtacatgttccgcctgtgttaccgggtgctccggcactcccaggaggactaccgtaagaaccaggagcacatagccaagcagttcgggatgatgcagtcacagattggctatgacatcctggccgaagacaccatcacggccctgctgcacaacaaccggaagctgctggagaagcacatcaccaagaccgaggtggaaaccttcgtgagcctcgtgcgcaagaacagggagcccaggttcctggactacctctccgacctgtgcgtgtccaaccgcattgccatccccgtcacccaggagctgatttgcaagtgtgtgctggaccccaagaacagtgacatccttatccagactgagcttcggcccgtgaaggagatggctcagtctcacgagtacctcagcatcgagtactcggaggaggaggtgtggctcacatggacggacaggaacaacgagcatcacgagaagagtgtgaggcagctggcccaggaggcaagggccggcaacgcacacgacgagaacgtgctcagctactacaggtaccagttgaagctgtttgcccgcatgtgcctagaccgccagtacctggccatcgacgagatctccaagcaactgggtgtggagctgcttttcctatgcatggcggacgagatgctgccctttgacctccgcgcctcattctgccacctgatgctacatgtgcacgtggaccgtgacccccaggagctggtgacccctgtcaagtttgcccgcctctggacagagatccccacggccatcaccatcaaagactatgattccaatctcaacgcctcccgagatgacaagaaaaacaagtttgccagcaccatggagttcgtggaggattaccttaacaacgtggtcggcgaggccgtgccctttgccaacgatgagaagaacatactgacctttgaggtggtcagcctggcacacaacctcatctacttcgggttctacagcttcagcgagctgctgcgactcacacgcacgttgctgggcatcatcgactgcattcaggcaccagccgctgtgctgcaggcctatgaggagcctggcggcaagaacgtgcggaggtccatccagggggtgggacacatgatgtccaccatggtgctaagccgcaagcagtctgtatttggtgcctccagcctgcctactggagtgggtgtccccgagcagctggacagaagcaaatttgaggacaatgaacacaccgtggtgatggagaccaagctgaagatcctggagatcctgcagttcatcctcaacgtgcgcctagactaccgcatctcctacctgctgtcggtcttcaagaaggagtttgtggaggtctttcccatgcaggacagcggggcagacggcacagcccccgccttcgattcctctactgccaacatgaatctggaccgcatcggggagcaggcagaggccatgtttggagtagggaagaccagcagcatgctagaggtggatgacgaagggggtcgcatgttcctgcgagtgctgctgcacctcaccatgcacgactacccacctctggtctccggcgccctgcagctgctcttcaaacatttcagccagcgccaggaggccatgcacaccttcaagcaggtgcagctgctcatctcagcccaggatgtggagaactacaaagtgatcaagtcggaactggatcgactgcggacgatggtggagaagtcggagctgtgggtggacaagaaaggcagcgtcaagggcgaggagggggaggcgggcgccagcaaggataagaaggagcggccctcggatgaggagggatttctgcagccacacggggagaagagcagtgagaactaccagattgtcaaaggcatcctggagaggctgaacaagatgtgtggggtcggggagcagatgcgaaagaagcaacagagactgctgaagaacatggacgcccacaaggtcatgctggacctgctgcagatcccttatgacaagaacgacaacaagatgatggagatcctgcgctacacacaccagttcctacagaagttctgtgccgggaaccctggcaaccaggcccttctgcacaagcacttgcagctcttcctcacgcccgggctcctggaggctgagaccatgcagcacattttcctcaacaactatcagctgtgctctgagatcagcgagccggtgctgcaacacttcgtgcactgctggccgacacacgggcgccacgtgcagtacctggacttcctgcataccgtcatcaaggccgagggcaagtacgtgaagaagtgtcaggacatgatcatgaccgagctgaccaacgcaggcgacgacgtggtggtgttctacaatgacaaggcctctctggcccatctgctggacatgatgaaggcagcccgagatggcgtggaggaccacagccccctcatgtaccacatctccctggtggacttgctggctgcctgtgcagaaggcaaaaatgtctacacagagatcaagtgcacttccctgctgcctctagaggacgtggtgtcggtggtgacccacgaggactgcatcacggaggttaaaatggcgtatgtgaacttcgtgaaccactgctatgtagacacggaggtggagatgaaggagatctataccagcaaccacatctggacgctcttcgagaacttcaccctggacatggctctggtctgtaacaagcgggagaagcgcctgtcagaccccacccttgagaagtacgtgctcaccgtggtgctggacaccatcagcgccttcttcagttccccattttcagagaacagcacatccctacagacgcatcagacaattgtggttcagctgctgcagtccaccacccggctgctcgagtgtccttggctgcagcagcagcacaagggctcggtggaggcctgtgtccgcaccctcgccatggtggccaagagtagagccatcttgctgccgatggatctggatgcccacatgagcgctctgctcagcagtgggggcagctgctcagccgcggcccaacgcagcgctgccaactacaagacggccacgaggaccttccctcgggtcatccccaccgccaaccagtgggactacaagaacatcattgagaagttacaggacatcatcacggccctagaagagcggctgaagcctctggtgcaggccgagctctcggtgctggtggacatgctgcactggcccgagctgctctttctagagggcagtgaggcctaccagcgctgcgagagtggcggcttcctgtccaagctcatccgtcacaccaagggtctcatggagtcggaggagaagctgtgcgtgaaggtgctgcggacgctgcagcagatgctgcagaagaagagcaagtatggggaccggggcaaccagctaaggaagatgctgctgcagaattacctccagaaccggaagtccggtccccggggcgagctcactgaccccacaggctctggcgtggatcaggactggtccgccatcgcagccacccagtgccggctggacaaggagggggccaccaagttggtgtgtgatctcatcaccagcaccaagaacgagaagatcttccaggagagcatcggcctggccatccgcctgctggacgggggcaacactgagatccagaagtctttctacaacctgatgacaagtgacaagaagtcagagcgcttcttcaaagtgctgcatgaccgcatgaagcgtgcccagcaggagaccaagtccacagttgccgtcaacatgagtgacctgggcagccagcctcgtgaggaccgtgagccagcagaccctaccaccaaaggtcgcgtgtcctccttctccatgcccagctcctcccgatattcgctgggccctggcttgcaccgggggcacgacgtgagcgagcgtgcgcagaacaacgagatggggacctcggtgctcatcatgcggcccatcctgcgcttcctgcagctgctgtgtgagaaccataaccgggacctgcagaacttcctgcgctgtcagaacaacaagaccaactacaacctcgtgtgtgagaccctgcagttcctggacatcatgtgtggcagcaccacagggggcctggggctgctggggctctacatcaacgaggacaatgtgggcctggtcatccagaccttggagaccctcacagagtactgccagggcccgtgccatgagaaccagacctgcatcgtgactcacgagtccaacggcattgacatcatcacggcgctgatcctcaatgacatcagcccgctctgcaagtaccgcatggacctggtgctgcagctcaaggacaatgcctccaagctgctcctggctctgatggagagtcgacatgacagcgagaatgcagaacgcatcctcatcagccttcggcctcaggagctggtggacgtgatcaagaaggcctacctgcaggaggaggagcgggaaaattccgaagtgagcccacgtgaagtgggccacaacatctacatcctggcactgcagctttccaggcacaacaagcagctacagcacctgctgaagccggtgaagcgcatccaggaggaggaggccgagggcatctcttccatgctcagcctcaacaacaagcagctctctcagatgctcaagtcctcagcccctgcccaagaggaggaggaagacccgctggcctactatgagaaccacacctcgcagattgagattgtgcggcaagaccgaagcatggagcagatcgtgttcccggtacctgccatctgccagttcctgacagaggagaccaagcaccggctcttcaccaccacggagcaggacgagcagggcagcaaagtgagcgacttcttcgaccagtcctccttcctgcacaacgagatggagtggcagcgccggcttcgcagcatgccgctcatctactggttctcccgccgcatgacgctgtggggtagcatctccttcaacctggcagtgttcatcaacatcatcattgccttcttctacccctacgtggaaggcgcgtccacgggcgtgctgggctccccactcatctcgctcctcttctggatcctcatctgcttctccattgccgcgctgttcaccaagcactacagcgtccgtcccctcattgtggcactggtccttcgctccatctactacctgggcattgggcccacgctcaacatcctgggtgctctcaatctgaccaacaagatcgtgtttgtggtgagctttgtgggcaaccgcggcaccttcatccgtggctataaagcaatggtcatggacatggagttcctgtatcacgtgggctacatcctgacgagtgtcctgggcctctttgctcatgagctcttctacagtatcctgctctttgacctcatctaccgagaggagacgctgtttaatgtcatcaagagcgtgacccgcaatggccgctccatcctgctaactgccctgctggccctcatccttgtctacctcttctccatcgtgggcttcctcttcctcaaggatgacttcatcctggaggtggaccggctgcctgggaaccactccagagccagcaccctggggatgccacacggagctgccacatttatgggcacatgtagtggggacaagatggactgtgtctctgaggtctcggtgcctgagatcctagaagaggacgaggagctggacagcacagagcgggcctgtgatactctgcttatgtgtattgtcaccgtcatgaaccacggactgaggaacggtggcggcgtgggcgacatcctccgcaagccctccaaagacgagtcgctcttcccagccagggtggtgtacgacctcctgttcttcttcattgtcatcattattgtcctgaacctcatctttggggtgatcatcgacaccttcgccgacctgcgcagcgagaagcagaagaaagaggaaatcctcaagaccacgtgcttcatctgtggtctggagagggacaagtttgacaacaagacagtgtcctttgaagagcacatcaaactggagcacaacatgtggaactacctgtacttcattgtgctggtccgtgtcaagaacaagacagactacacgggccccgagagctacgtggctcagatgatcaagaacaagaacctggactggttcccacggatgcgcgccatgtccttggtgagcggcgagggcgagggcgagcagaacgagatccgcatcctgcaggagaagcttggctccaccatgaagctggtctcgcacctcaccgcccagctcaatgagctcaaggaacagatgacggagcagcggaagcggaggcaacgtctgggcttcgtggacgtgcagaactgcatgagccgctgagcagagcggagcctcggaggcccccacgggaggccggcttgcccacagctgccgcccttccttcaggtcaggtagaagccaggtgcctgccccatcttcagctcagctgccaccctccctccccaagccaggctctggccagcgggagtgccagagcagagcacggtcctgcttagtaagtacccttgaagagactcggtttaccttagtgccttaggggatgcaagttctccagactgctgtccttcgaagcagtgactggcatttctcagtggccctggcaggtggttaaaagtgggctggctctcacctccaagcactacattgtggctgtcccctgcctgccaccctggctaggaaggtggtagcctgctgttattagcttcctagggctttgatatttaacttattctgggggccatcccaacctcctgtggcctgctggggacagtgtggccccgtcccaggagcctcatgactcaggtggaccttgctcccaggactttctctaggctttgtaggcaagcctcacaagcccagcaacaggcctgggctgtgtgacagtggcttctctctttttggtgtaatgttttacatgtcctgtgtcctggagactaatgtgttaattgccttaaataaattaatagactccaaaaaaa

SEQ ID NO: 1178 - DNA, 4377 bp, Rattus norvegicus
agtcggtcgactccgagctcagtgaggacctaaagcagaggactgtggtgcggaggacagtgcttgctccggggagtgcagagcaataggtccccactcaagatggcagaggctcaccaagctgtggccttccagttcaccgtcacccccgatggcattgacctccgcctgagccacgaagccctcaaacagatctgcctgtcggggctgcactcctggaagaagaagttcatccggttcaagaatggcatcatcactggtgtgttccccgcgaatccgtccagctggcttatcgtggtggtgggtgtgatttcatccatgcatgccaaagtggacccctccctgggcatgatcgcaaagatcagtcggaccctagacaccactggccgcatgtcaagccagacgaagaacattgtgagcggcgtcctctttggtacagggctctgggtggcagtcatcatgaccatgcgctactcgctgaaggtgctgctctcctaccacggctggatgtttgcagaacacggcaaaatgagccgcagcaccaagatctggatggctatggtcaaggtcctctcaggtcggaagcccatgttgtacagcttccagacgtctctgccacgcctgcctgtcccagctgtcaaagatactgtgagcaggtacctggaatctgtaaggccactgatgaaggaagaagacttccagcgcatgacagcactggcccaggattttgctgtcaacctcggacccaaattgcagtggtatttgaagctaaaatcctggtgggccacaaattacgtgagtgactggtgggaagaatatatctacctgcggggccgagggccgctcatggtcaacagcaactactacgccatggagatgctgtacatcaccccaacccatatccaggcagcgagagctggcaacaccatccacgccatactgctgtatcgtcgcacattagaccgtgaggaactcaaacccattcgtcttctgggatccaccattccactctgctcagcccagtgggagcgactcttcaatacttcccggatccctggggaggagacagacaccatccaacatatcaaggacagcaggcacattgttgtgtaccacagagggcggtacttcaaggtctggctctaccacgatgggaggctgctgaggccccgagagctggagcagcagatgcagcagatcctggatgatccctcagagccacagcctggggaggccaagctggccgccctcactgctgcagacagagtgccctgggcaaagtgtcggcagacctattttgcacgagggaaaaataagcagtccctggatgcggtggaaaaggcagcgttcttcgtgacgttggacgaatcggagcagggatacagagaggaggatcctgaggcatccatcgacagctacgccaaatccctgctgcatggaagatgctttgacaggtggtttgacaagtccatcacctttgttgtcttcaaaaacagcaagataggcataaatgcagagcactcctgggcggacgcgcccatcgtgggccatttgtgggagtatgtcatggccaccgacgtcttccagctgggttactcagaggatggacactgtaaaggagacaccaaccccaacatccctaagcccacaaggctacaatgggacattccaggagagtgccaggaggtcatagatgcatccctgagcagcgccagtcttttggcaaatgatgtggacctgcattccttcccatttgactctttcggcaaaggcttgatcaagaagtgccggacgagtcccgatgccttcatccagctggcgctgcagctcgcacattacaaggacatgggcaagttctgcctcacatatgaggcctccatgacccggctcttccgagaagggaggacagagactgtacgctcctgcactatggagtcctgcaactttgtgcaggccatgatggaccccaagtcaacggcagagcagaggctcaagctgttcaagatagcttgtgagaagcaccagcacctgtaccgcctcgccatgacgggcgccggcatcgaccgccatctcttctgcctctatgtggtgtccaagtatcttgcagtcgactcacctttcctgaaggaggtattgtctgagccatggaggttgtctacgagccagactcctcagcagcaggtggagctctttgactttgagaaaaaccctgactatgtgtcctgtggagggggctttgggccggttgccgatgacggctatggtgtctcctacattatagtgggagagaatttcatccacttccatatttcttccaagttctctagccctgagacagactcacaccgctttgggaagcacttgagacaagccatgatggacattatcaccttgtttggcctcaccatcaattctaaaaagtaaacccctgagccacacggaaggaaaacggaccctcgtgatacaaaccaaatgaatagatgttgctcctgaccataggacaggcagaaaattgctcttataaaactcagttttccttccagaaggtttaccgtcagtctccctagaacaacagtaggcttcacgtgtgaattgtgaccctactacatccagagatgccttggctccaggaatattgggcacagtcccctgatgtcttttgaatcggctcctactggataaagggatttaaatgctggtgaattcctggattctgggggttgtttcttcacatgtgttggaggtgacagacttcctcagtggtgaccctgtgaatacttgggcgtctgactccacccaggcagtgtgagcatcaccttgtggaaagagaaagtgtcttcagagccagcagaggcaacagctgtagctaacacatctgtaacacactaatggaatggttaggcctggggattaaggttctgctatgagtgacagccactgtccctttggaagttcacatttccaggaagcagagtaccacctccccagtgccaccttcctcacacatcttcaaaacccagtgccttaaagaaggggcccattggcaagcgggaccatagagaagacttagcatctgtgaagcctttgggtggatatgtgaggatgctgcttccccttactggttcctgcataaagatgtccctaagtaagcacttcccccacccctagaaaatgaggtccttggtgaaggcagggatgctggagtctcattgcctgccagttccattaagccacaaaatagcagacatgtgtccacagagggaggggcttggtagtcaaaggctgcatagctggacaacagcgggagagtgtggcttgctgtatttgacagctgttggcaagaggagtgagaccctggtcaccaagtcagacatactgacacaggcagccaaagctcacggagccaggagatatagatagatactggcttgtattctggcagatacacccctgggcttatcttctaatcccacccagtcagattccaaccagagtcaaattccatagaaggctaggtcattttggcgacagactcagggatctcaagtaatgggtgcttttacccacatgccatccctcagtgggagtgcctttcttgaaagcatccaatgggctaaagcagctctaccaagtctgtttggtatttaatgtaaacattagcattaatggagtggtctctcctacctgtcaccatcctgtcctgacaagcttagctctccgaggtttacatcatgtatttattttccagtgcccctttggccttgtttgattcctgcccctgtgccagaagtggcccagaagtgaggggtggggtgaccagcagtgcagagaggtgctggctgaacagttcatgtgtgtcttatgggtatacatgtataaattttgtaatgtaaaaaaaaaaatcatacctaaaagggccaaagttttttttttttttactaaaaccaagaaaacaaaagacaacataaagacataagcagaaacaaactgttgtaagtcagagcggcctgactctcgctgctgtgaccactcaccaacctgtgttactcagagtagcccggctagtgcccgagtgggacattcctctctcaggtttccagtgtccttgctgctcctgagcagttaccaatgcaatttcgcattccttacaaggcagaagagtgggctctcactgtatgtgttcaaaggaggaggtaagactattgtgtatttaatttaatgtggaacaaaatatagtcttaccgcagccaaggttcaaatttggtgttctaatctgtccattgcatgtaaataccatatctgtttggatataaatcttagaagtgcatgtgtgagcgaatgtagctggccattaataaaacattaatactgtctact

SEQ ID NO: 1179 - DNA, 603 bp, Rattus norvegicus
ggaagagctaagaagagctgttggctcggggacacaatctaggaagatggtggctttgaagacctgctctctgctgctggtgctcctgttcctggctgtcgggctgggagaaaaagaagaggttgagttccgatcccatgctaaatttgctggcccccgaccacgaggcccaaggtatgcagaggggactttcatcagtgattacagcatcgccatggacaagatccgccaacaagactttgtgaactggcttctggcccagaaggggaagaagaatgactggaaacacaacctcacccagagagaggcccgggctttggagctggcaggacaatctcagagaaacgaggagaaagaggcacaggggagctctttgcccaagagcctcagtgatgaagatgtgctgagggaccttctgattcaagagctactggcctggatggcggaccaagcagagctctgtcgactgaggtcccagtgaccgacctaccccggagcaggactggactctgaccttagcttgctcagatcctgcttctgccctggtccaaagtctctgagagaaccaaaccaataaagccttgagctgaagtaaaaaaaaaa

SEQ ID NO: 1180 - DNA, 1944 bp, Rattus norvegicus
ggtgaagaaggagcgggccctcgccgctcgttctcgctccctctttctctctctcttcttctctctctctttccctctcgggcaacatggcgggcgtggaagaggcatcgtctttcgggggccacctgaatcgcgacctggatccagacgacagggaagagggaacctccagcacggccgaggaagccgccaagaagaaaagacggaagaagaagaagggcaaaggggctgtgtcagcagggcaacaagaacttgataaagaatcgggaacctcagtggacgaagtagcaaaacagttggagagacaagcactggaggagaaagagaaagatgatgacgatgaagatggagatggtgatggtgatggtgcagctgggaagaagaagaaaaagaagaagaagaagagaggaccaagagttcaaacagaccctccctcagttccaatatgtgacctgtatcctaatggtgtatttcccaaaggacaagagtgtgaatacccacccacccaagatgggcggacagctgcttggagaaccacaagtgaagagaaaaaggcgctagaccaggctagtgaggagatttggaacgacttccgagaagctgccgaagcacaccggcaagttaggaaatacgtcatgagctggatcaagcctgggatgacaatgatagaaatatgtgagaagttggaagactgttcccgaaagctcataaaggagaatgggttaaatgcaggcctggcctttcccactgggtgttctctcaacaactgtgctgcacattacactcccaatgctggtgacacgacagtcttacagtacgacgacatctgtaagatcgactttggaacgcatataagtggtagaataattgattgtgcttttactgttacttttaatcccaaatatgacatattattaaaagctgtaaaagatgccaccaatactggaataaagtgtgcggggattgacgtccgtctctgtgatgtcggcgaggccattcaagaagttatggagtcctatgaagtggaaatagatgggaagacctaccaagtgaaacccatacgtaacttaaatggacattcaattgggccatatagaattcatgctggaaaaacagtgcccattgtgaaaggaggggaagctacaaggatggaggaaggagaggtgtatgccattgagacctttggtagcacagggaagggcgtggttcatgacgatatggaatgttcacactacatgaaaaattttgatgtgggacacgtgccaataaggcttccaagaacaaaacacttgttgaatgtcatcaatgaaaactttggtacccttgccttctgccgaaggtggctggatcgcttgggagaaagtaaatacttaatggctctgaagaacctgtgtgacttgggcattgtagatccatatccaccactctgtgacattaaaggatcatacacagcacagtttgaacataccatactctgcgcccaacctgtaaagaagttgtcagcagaggagatgactattaaaacttagtccaaagccaactcaacgtctttattttctaagctttgttggaacacattataccacaagtaatttgcaacatgtctgttttaacagtggacctgtgtaatgccgttatccatgtttaaaggagtttgatcaaagccaaactgtctacatgtaattaaccaaggaaaaggctttcaagactttactgttaactgtttctcccgtctaggaaatgctgtactgctcactagttaggaattacttaaacgttttgttttgaagacctaagagatgctttttggatatttatattgccatattcttacttggatgctttgaatgactacatacatccagttctgcacctatgccctctggtattgctttttaaccttcctggaatccattttctaaaaaataaagacattttcagatc

SEQ ID NO: 1181 - DNA, 643 bp, Rattus norvegicus
aaagggcagcggttcctcttggtgattgtatcgcgccctcttgctgctaattaccgcgttctccattcctccacatgctgtctctagactttctagatgatgtacggcgaatgaacaagaggcagctgtactaccaagtcctaaattttggaatgattgtctcctcggcactaatgatctggaaggggctgatgttgataaccggaagtgagagtccaattgtagtggtgctcagtggcagcatggagcctgcgtttcacagaggggatctccttttcctcacgaaccgagttgaagatcctatacgtgtgggggaaatcgttgttttcaggatagaaggaagagagattcccatagtgcatcgagtcttgaagatccatgaaaagcaagatgggcatatcaagtttttaaccaaaggagataataatgccgttgatgaccgaggcctctataaacaaggacaacactggctggagaagaaagatgttgtagggagagcaagagggtttgttccgtacattggaatcgtgacgatcctcatgaatgactatcctaaatttagttatgcagtactgtttctgctgggtttatttgtgctggtccatcgtgagtaagaagccggcctcgctggtcctgggaggct

SEQ ID NO: 1182 - DNA, 1317 bp, Rattus norvegicus
ggtttttttcaaaatgtctactgtccacgaaatcctgtgcaagctcagcttggagggtgatcattctacacccccaagtgcctatgggtcggtcaaaccctacaccaacttcgacgctgagagggatgctttgaacattgaaacagcaatcaagaccaaaggcgtggacgaggtcaccattgtcaacattctgactaaccgcagcaatgcacagaggcaggacattgccttcgcctaccagaggaggaccaaaaaggaactgccatcggcgatgaagtcggccttgtctggtcacctggagaccgtgatgttaggcctgttgaagacacctgctcagtacgatgcctctgagctcaaagcctccatgaagggcctggggactgatgaggactccctcatcgagatcatctgctcaagaaccaaccaggagctgcaggagattaaccgagtgtataaggaaatgtacaagaccgatctggagaaggacatcatctctgacacatctggagaattccgaaagctgttggtcgcccttgcaaagggtaaacgggcagaggatggttctgttattgactacgagctgattgaccaggatgcccgggagctctatgatgctggggtgaagaggaaaggaaccgatgtccccaagtggatcagcatcatgactgagcgcagtgtgtgccacctccagaaagtgttcgaaaggtacaagagctacagtccttatgacatgctggagagcatcaggaaagaggtcaaaggagacctggagaacgccttcctgaacctggttcagtgcattcagaacaagcccctgtactttgctgaccggctgtatgactccatgaagggcaaggggactcgagacaaggtcctgattagaatcatggtctctcgcagtgaagtggacatgttgaaaatcagatctgaattcaagaggaaatatggcaaatccctgtactacttcatccagcaagacactaagggtgactaccagaaggcgctgctgtacctgtgtggtggggacgactgaagggcttggcatggtggattgcccagaagtggccctacctgtgccccaacctaatgttctagagaatcagcctgccactaatggacccctgaactcctccctgtgaagatgacgacagagctgccgacccatcccccatcttagctgcctttgcctggctttcccctcattctctcctttatgccaaagaaatgaacattccagggagttggacgtaccgtctgtgacatgagacacttcctcatatgtgtcgtgaataaaccatttttactttagaaaaaacc

SEQ ID NO: 1183 - DNA, 116 bp, Rattus norvegicus
tttaaagtaatccttggctacctagtgagtgtaaggccagcctggaatcaataagagttggtttcaaagaagcaggaggagaaggaggaacaggaacaggaggaggagcaggggga

SEQ ID NO: 1184 - DNA, 2410 bp, Rattus norvegicus
tacgctgctttggtggcgtgcacctctcacggtgtgcctagccgccgatgcccaggctgcacgatcacgtctggagctacccaagcgcgggcgctgcgaggccgtacagcctcccgcgaggcatgattgcggcggccctctgtccgcagggccccggagcccccgagcccgagcccgcgccccggggccagcgagagggaaccgcaggcttcagcgcacgacccggcagctggcaccacgacctggtgcagcggagcctcgtgctcttctcatttggcgtggtcctggctctggtgctcaacctgctgcagatccagcggaatgtcacgctcttcccggacgaggtgatagccaccatcttctcctccgcctggtgggtgcccccgtgctgtggcacggcagccgctgttgtcggcttattgtatccctgtattgacagtcacctgggagaaccacacaagttcaagagagagtgggccagtgtcatgcgatgtatcgcggtgtttgttggcatcaaccatgccagtgccaaattagatttcgccaataatgtgcagctgtccctgactctggcagccctatccttgggcttgtggtggacgtttgatcgatcccgaagtggcctggggctcgggatcaccatcgccttcctagccacgctgatcactcagtttcttgtttataatggcgtctaccagtacacgtccccagatttcctctatatccgttcttggctcccttgtatatttttctcaggaggtgtcacagtgggaaacataggacgacagttagctatgggtgttccagaaaagcctcacagtgactgagtttgagcacatgattcagggcggaagcagaatgtggagacactggtcctgggtgtggtgaagaggatctttttctcaatgttccatttagactgggctgatgataaatgactcctaaagatgcgttcacgtagtctaaatagcaagtggaggcaaggactacttacctaaagtcttaccttgctcacccaccctcacacctgtctgcactggaacattctatcccaggctgtatgtgagagttgggtaagggggccggtttcccgagtattagatttcactcatcattcaaagcaaaatgccatatttcaaagccttgaatcaaaatgaattaccaactagcagttttatatcagtgcccaaaggagagaggttgatggtgcttaacagagatgaagtatgtgcagtaagaatatttatccagaattaaaatatagggttgtgtaaagaggggctaagggcagcagtaagttggaggaagatcatgctccccggaggacccagtgcagccacatctccaggtctcgctcaggctggcgctcacacgtgggtctcatcagtgtgggaactatgctgtttactgacaggaggcttgtagacaatcttactgacagcccaggacaacacaaagtcaggattctgcattgcgatgctggacttttcatctcaatttaagtgaagttttatccaagatctggagcatctaagagtgaatagctgtctgctgtttcagtcgtaatgagccgaaattgtgtctctgtcactccagagtggagaggacttttccacagccctatggagcttgcaatctgtgattgccttgtaaaaggttgagtgtgcacgtcactgcgttcggtgcgcagtgtcctgtgtgtgttggacagcgtagaacacatgggaccttgcaagtattgggtcttcaacttcaagtgcaatgtgtatgaaaccaatctgagccttgtattctcttaaatatttattatttttttttaaccgcgcgagctgttctggagaagggttctcgggtcatttcagagctgtgtgaggcacactcagcaatactgtgtcagccgtgacgctccccagtcacaccctccactacaccctagtcctttgacatactccaggtttgtaagtttagtgatttttacttacaaatttacccttttttgcattctaaaattgtgtttaaattatatggaagtacttggtgtaggcagtcattggtccccgggcagcagaagctctgcctgtggaatcgggtttgggttcactctgcagggctcctcatagaggctttgcttatttgttttgaggaaaatgtctggagtaaacctttgttttctgaaactactttagctaaaagaaaatgggtgttctagactttggaatggttcttaaagtttcctggaaataaaaataatgattggcacttcaaagacattctttagccaagacttcagtgtctagcagaaaccacaagtgactagaagagcaagtgatcttggtgatgcacttgattgtatacaatgagtattttttctcttaaactggaaataaatctgttagaaataatatagcca

SEQ ID NO: 1185 - DNA, 209 bp, Rattus norvegicus
cagatactctcgacctcttacatttggagagttttgagcagacaggaagaagacggagcctgggagcagctgttctccaatagtcaaattaagactgttcctctctgagctctgtacttcaaccagcacctttaggcagaagccatcaaatcagaaatgtctgttaataattaaagtctatgattgccaccaaaaaaaaaaaaaaaaaa

SEQ ID NO: 1186 - DNA, 115 bp, Rattus norvegicus
aatcccaatattaagaggttaaaaaataggaccagaagtttaaagtaatccttggctacctagtgagtgtaaggccagcctggaatcaataagagttggtttcaaagaagcagga

SEQ ID NO: 1187 - DNA, 242 bp, Rattus norvegicus
tcctgtcactcatgtggacctcagataagagcacagatactctcgacctcttacatttggagagttttgagcagacaggaagaagacggagcctgggagcagctgttctccaatagtcaaattaagactgttcctctctgagctctgtacttcaaccagcacctttaggcagaagccatcaaatcagaaatgtctgttaataattaaagtctatgattgccaccaaaaaaaaaaaaaaaaaa

SEQ ID NO: 1188 - DNA, 7204 bp, Rattus norvegicus
cgcaaagttgggcagggagctgggggaggaggaccgcgagcgagggtggcggagcaggggcgggaggagcggagggaggaggggaccggagcgtgtcactcgcgcgctccctctgtgcacagaggatgtgctgaatggtgcgcttccaggcggcggccgagcaggatcaggcggcgggcggctcgcactgccgggctctgctccttcttgtctcccgaggctctacaatcaccgcgggctccagaccctgcgtcccgcccggggcatggcaggctgctgtgccttgcggtgtagtcccgcttactaagcggcgcgggccagaggtgcggaggccaagaggccgggaggtcggcgggcagcggaggcaagagcctgctgaaccgagagccaagcccgcttgcgcccggagctccgtgtcccgtctccactgcgctcgcccgggccgcccggagccccgatgagcccagatggctggggctcagcccggagtgcacgccttgcaactcaagcccgtgtgcgtgtccgacagcctcaagaagggcaccaaattcgtcaagtgggatgatgactccactatagttactccaattattttgaggaccgatcctcagggatttttcttttactggacagatcagaataaggagacggagctgttagatctcagcctcgtcaaggatgccaggtgtgggaagcacgccaaagctcccaaggaccccaagttacgtgaacttctggatgttgggaacatcggacacttggaacagcgcatgataactgtggtgtatgggccagacctggtgaatatctcccacctgaatcttgtggcttttcaagaggaagtggccaaggaatggacaaatgaggttttcagtttggcaacaaacctgctggctcagaacatgtccagggacgcatttctggagaaagcatatactaagctcaagcttcaggtgaccccagaagggcgcattcctcttaaaaacatctatcgactgttttcggcagaccggaagcgagtggaaactgcgctagaggcttgtagtcttccatcgtcaaggaacgattccatccctcaagaggactttactccagatgtatacagagttttcctgaacaatctttgtccccgacctgaaattgataacatcttctctgaatttggtgccaaaagcaaaccgtaccttactgttgatcagatgatggattttatcaaccttaagcagagagatccccggctgaatgaaatactttacccacctctgaagcaagagcaggtccaagtgttgattgagaagtacgagcccaacagcagcctcgccaagaaagggcagatgtcagtggatggattcatgcgctacctgagcggagaagaaaatggagtcgtttcacctgagaaactggatttgaacgaagacatgtctcagcccctgtctcactatttcatcaattcctcacacaacacctacctcacagctggccagttggctgggaactcgtctgtagagatgtatcgccaggtgcttctgtctggatgtcgctgtgtggagctggactgctggaagggcaggaccgctgaggaagagcctgtcatcacccatggattcaccatgacaacagaaatatccttcaaggaagtcatagaagccatcgcagagtgtgcgttcaagacttctccttttcccatcctcctttcctttgagaaccatgtggattccccgaagcaacaagccaagatggccgagtattgccgattaatctttggtgatgccctccttatggagccactggaaaaatacccactggaatctggggtacctcttccaagccctatggatttaatgtataaaatcttggtgaaaaacaagaagaagtcacacaagtcgtcagagggaagtggtaaaaagaagctctctgagcaagcttccaacacgtacagcgactcttccagcgtgttcgagccttcgtctccgggagctggggaagcagatacggagagtgatgacgatgacgacgatgatgactgtaaaaagtcttccatggatgaggggactgctggcagcgaggccatggccacagaagagatgtctaacctggtgaactatattcagcctgtcaagtttgagtcctttgaaacttcaaaaaaaagaaataaaagctttgaaatgtcttccttcgtggaaaccaaaggactcgaacaactcacgaagtctccagttgaatttgtcgaatacaacaagatgcagcttagcaggatatatcccaaaggaacacgcgtggactcatccaactacatgcctcagctcttctggaatgctggctgtcagatggtggcgctcaacttccagacagtggatctagctatgcagataaacatgggcatgtacgaatacaatgggaagagtggctacaggctgaagccagagttcatgaggaggccagacaagcattttgatccatttactgaaggaatcgtagatgggatagtggccaacactttatctgttaagattatttcaggtcagtttctctctgataagaaagttgggacttatgtggaagtggatatgtttggtttgcctgtggacacaagaaggaaggcatttaaaaccaagacatcccaaggaaatgctgtaaatcctgtctgggaagaagagccaattgtattcaaaaaggtagttctgccttctctggcctgtttaaggatagcagcatatgaggaaggaggcaaatttattggccaccggatcttgcctgtgcaagcaattcggccaggctatcactacatctgcctgcggaatgagaggaaccagcccctgatgctgccagctgtctttgtctacatagaagtcaaagactatgtcccagacacgtatgcagatgtaattgaagcattatcaaacccaatccgatatgtcaatctgatggaacagagagctaagcagttggctgcattgacactggaggatgaagaggaagtcaagaaggaggctgaccccggggaaacgtcatccgaggctccaagtgaaaccaggacaactccagcagagaatggggtgaatcacaccgcaacccttgcacccaagccaccttcccaggctccacacagccagcctgctccagggtctgtgaaggcacccgccaaaacagaggatctgattcagagcgtgttaacagaagtagaggcgcagaccattgaagagctcaagcaacagaaatcgttcgtgaaacttcaaaagaagcactacaaagaaatgaaagacctggtcaagagacaccacaagaaaaccaccgagctcatcaaggagcataccaccaagtacaatgagattcagaatgactacttgagaaggagggcagccttggaaaagtccgccaaaaaggatagcaagaagaaatctgaacccagcagcccagatcatggctcatccgccattgagcaagacctcgcggccctggatgcagaaatgactcagaagttgatagacttgaaagacaagcaacaacagcagctgcttaatcttcggcaagagcagtattacagtgagaagtaccagaagcgggagcacattaaattgctcattcagaagttgacagatgttgctgaagagtgtcagaacaatcagttgaagaagctgaaggaaatctgcgagaaagagaagaaggaattaaagaagaaaatggataagaagaggcaggagaagataacagaagccaagtccaaagacaaaagccagatggaagaggagaagacagagatgatccgatcatacatccaggaggtggtgcagtacatcaagaggttagaggaagcacaaagtaaaagacaagaaaaacttgtggaaaaacacaaggagatccgccagcagatcctggatgagaagcccaagggggaaggctcctcctcagtcttgtcggaaagttgccatgaggatccctctgttccccccaactttactccccccaaccctcaagctctcaagtggtgagcaccgtccttctagccagctgcagatggagctggagcaagaataccaagacaagttcaaaagactgcccctggagattctggagtttgtacaggaagccatgaaagggaaggttagtgaggacagcaatcacggctctgcccctccctcgctggcctcagaccctgctaaggtgaacctcaagtctccctccagtgaggaggtacaaggagagaacgcgggaagagagtttgatactcctctgtgatgtccctgccgggcctaccagacatgcacggctgcttgaactccatcggactctaaagacaaagatcactgcccgggccatcttcctgagaaacatcccttagcctgaaatccacaccaaagggagagttccagaaggatccgtgtgaaggtcccatacccttgtcccttgtgtcatgtggaaactattgtggtcttagagagaagggtgcatgtatgcaggatttttcttttcgttccaatagtaaattaaaagcaggcagctccaggctccatggactatgtaatgaaggacaatgtcttctttgaagaaaactagagctcgtgtcttcgtttgaagccctggtgtacagtatttccaagtaaaagagagagtttgagaagtgcgcggcaccatttaacactctggaacattccactctgagcattgtttccctgactgccccgcaaacccatgttttcaagttaacgtgtatagtgcattgtttcaccctttgctttgcaggcactggtggcttgccatttgctaatttatttatcccagaggcatctgtatttgctattgacatggctttattagataccatagtgactcatataagctggtttcttttataaaaaaaaatcacatgactgtatcatttcccagtgaagccattttacgattagcaatatgggttgtatatttggctgcacgtctttggatatctatcggttgttgacctgaggctatcaaacagctgcaatgggtttgttctgttgagtcagggtttccgccagactgaacaggatccagtgggctattttattgtcagatattttttcgtggttcatttatttttactgtagaaaggaagatagaatatttatctaaatgcacatgtataaatgatatacattatctccatgtatatagtacatgtatgcacccagccatataagtgcacacacatacatacgcatgagtgtacatgtgtgtttattaattggcagtgacccaaatctcttccataagatttaaaagcaagttcagggatacatggacagagaagaaatgggtcgaatatatgttatgtggataattaaattatacggaaatgctaagaatcagtttatggagtcaatgatgcaacttgaggtaatcttagaatttagaaaatgagtttactaaaaaaattggaggatcaaaaattggattttaagtatcagattttgagcttgttttaatggtcagtgtatgcaaaaatgcataggaaatagagtgcaaatgtattactactatcttcaataaattttaactgaataatttcaattttatactgatagaaataaagctctggttgtattttagtttgtatatttacttcacttagttatgtcttttttaattcttattttattctaaagtgaataagagaaacaaattatatcatgctaacgctaataaaatcataattaaaaggtcttaagaaataatattatatagaaaaaatatggtttagagagtgggacaaagaacattaaaacccagcaatgacaatgcccatggcttcattttattttaaagtgaacctgtctgcttataatttagcaaagcaaaaaacagttgtgtcctgaagtttgtgtttcaagaatttagtatttttctggaaataattttatttaactttaagcaataactaggaccataattaagtgttaatcaaaatgaaggcttgtttcaaacaccatgaaagtgtttgatcacacacatacaccacacacacacacacacacacacacacacacacacacacacacacacacctattgagacacaaggggaaaaaaatcacatccccttcagagatgattgtattttatctgaaggatcaagagtgttaattagtcacttactaaagcttaccttccactgaagagagatctcttgtgaaccatacaacttttgcactttgaaggaaaggcattactcagaaggaagtgaggacagtccaaatggaatgctgcattttacacacacagttacagactgttgaaaattggggaagagtgaatggataacaggattcgaaaccaaacttagtggtggttgttgcggaacattggatttcaacatactccatacagcgactgaggttgaataaccttgactttcaaatcctgttttggtagttggacttcattatcttggtgattctagtcattttacaatgttttgtatttggtcatttactgtaatcacatttttatatctgtacagtgacactttttgcagttgtggggtagtgtgtaacactgtgcatcttgcatcatcgaaactactaccgtgatactatccattgataatattaatattacttgaaaaatgacaaaggtaaagaaaaggggtctgtatgatgtgcagttttgtgcctttatgtatttgccttgttcttcgttgaatgtgtgaaattctgtactgtggtttttccaatagtagaaagtagagtcatgcattaaattagactgtatccctgacacctttaaactactgagaataacgtggttggccgtgtaattcagtgttcaaagttctaatgacatgccatgtgctttggtttttaacatttcatgaccaccatacattaattaatactcctgtaatagataagcagtcattaattaagttccaaaagaaagggccattgcttgcattcctttgaatttaatgttgcccttgtacactgtgttaatactgtatgtaatggattgaacattgtgattctcgccttttaagaagagaaagagagagaaggaaaagtatttgatgctcttaaaatgtacatatttgggttcttctatctcaaattatttaaaatgcataattcacatttttttgtaatcattctatgcaattttgtggcatgacgtttcttccacttgtaattttctgtgctttcatcacaagtccaaaggaaacaataaaaatt

SEQ ID NO: 1189 - DNA, 1356 bp, Rattus norvegicus
cccggagctgtcgatcggggacaaagcgcggccgcccgcgccccccgagccgcccgagccggggccagccccccgcgactgacatgatgtttccgcaaagccggcactcgggctcctcccacctcccccagcagctcaagttcaccacctccgactcctgcgaccgcatcaaggatgagttccagctgctacaagcgcagtaccacagcctgaagctggagtgtgacaagctggccagcgagaagtcagagatgcaaaggcattacgtcatgtactatgagatgtcttacggattgaacatcgagatgcacaaacaggctgaaattgtgaagaggctgaatgggatttgcgcccaggttctaccctatttgtcccaggagcatcagcagcaggtcctgggagctatcgagagagccaagcaggtcacggctcccgagctgaactccatcatccgacagcagctccaggctcaccagctgtcccagctccaggcgctggccctgcccctgacaccgctgcctgtcgggctccagccgccatccctccctgcggtcagcgcaggcacaggcctgctgtcactctctgctctgggctctcagacccacctctccaaggaggacaagaacggacacgatggggacacccaccaggaggatgatggagagaagtccgattagctcctggggagagggagggggaggggggataccaggggagacaggcacagagagcacagtgttctgagggccacactgcacacagctcggtccctacccaagcttccacctccagtcctggttccagctgtgcaccctgggcctaggagacgccagagggacagcccaggctacagggaaaattccccaccttcaacatttccccgggctacagccaccaatctcggcccagaatgtacacaacgctagccgcccctttccaccctgtgcaccccgaatttgccccctttccccttctctgcttcctgcactgcacacctgctaggcccagacccctccccccagctcacccagctctggttccctcaaccgcggaaagaaagcattggctcgggactgcagtgggggtgggcaccccacaaacttccctctccccttccccaaataaacgtgagggttaaaagtcggtttgtttattatttctttttcgtcccagtactctatagctaccatctaagagagaaaaagaaggaagccctggagcgagcgagggtctgtctgtgcatatagttagatttttctggtcgcctcgctttgcaccgagaggtggagggccgctgtactgagggtggggtctagctgtgccttcaaaataaaaacatgaaaaggtcaaaaaaaa

SEQ ID NO: 1190 - DNA, 2455 bp, Rattus norvegicus
agagaagcagagaagcagagcaagcggcgcgttcccgaacctcgggcaagaccagcctctcccagagcatccccaccgcgaacgcacccttctccagagcataccccagcggaggccacccttccccagagcatccccgccgccaagcgcaaccttccagaagcagaccgcagcgacatggccaagaaaacagcgatcggcatcgacctgggcaccacctactcgtgcgtgggcgtgttccagcacggcaaggtggagatcatcgccaacgaccagggcaaccgcacgacccccagctacgtggccttcaccgacaccgagcggctcatcggggacgccgccaagaaccaggtggcgctgaacccgcagaacaccgtgttcgacgcgaagcggctgatcggccgcaagttcggcgacccggtggtgcagtcggacatgaagcactggcccttccaggtggtgaacgacggcgacaagcccaaggtgcaggtgaactacaagggcgagaaccggtcgttctacccggaggagatctcgtccatggtgctgaccaagatgaaggagatcgccgaggcgtacctgggccacccggtgaccaacgcggtgatcaccgtgcccgcctacttcaacgactcgcagcggcaggccaccaaggacgcgggcgtgatcgcgggtctgaacgtgctgcggatcatcaacgagcccacggcggccgccatcgcctatgggctggaccggaccggcaagggcgagcgcaacgtgctcatcttcgacctggggggcggcacgttcgacgtgtccatcctgacgatcgacgacggcatcttcgaggtgaaggccacggcgggcgacaccgacctgggcggggaggacttcgacaaccggctggtgagccacttcgtggaggagttcaagaggaagcacaagaaggacatcagccagaacaagcgcgcggtgcggcgcctgcgcacggcgtgcgagagggccaagaggacgctgtcgtccagcacccaggccagcctggagatcgactctctgttcgagggcatcgacttctacacgtccatcacgcgggcgcggttcgaggagctgtgctcggacctgttccgcggcacgctggagcccgtggagaaggccctgcgcgacgccaagctggacaaggcgcagatccacgacctggtgctggtgggcggctcgacgcgcatccccaaggtgcagaagctgctgcaggacttcttcaacgggcgcgacctgaacaagagcatcaatccggacgaggcggtggcctacggggcggcggtgcaggcggccatcctgatgggggacaagtcggagaacgtgcaggacctgctgctgctggacgtggcgccgctgtcgctgggtctggagaccgcgggcggcgtgatgacggcgctcatcaagcgcaactccaccatccccaccaagcagacgcagaccttcaccacctactcggacaaccagcccggggtgctgatccaggtgtacgagggcgagagggccatgacgcgcgacaacaacctgctggggcgcttcgagttgagcggcatcccgccggctcccaggggcgtgccccagatcgaggtgaccttcgacatcgacgccaacggcatcctgaacgtcacggccacggacaagagcaccggcaaggccaacaagatcaccatcaccaacgacaagggccgcctgagcaaggaggagatcgagcgcatggtgcaggaggccgagcgctacaaggcggaggacgaggtgcagcgcgagagggtggctgccaagaatgcgctcgagtcctacgccttcaatatgaagagcgccgtggaggacgagggtctcaagggcaagatcagcgaggctgacaagaagaaggtgctggacaagtgccaggaggtcatctcctggctggactctaacacgctggctgagaaagaggagttcgtgcacaagcgggaggagctggagcgggtgtgcaacccgatcatcagcgggctgtatcagggtgcgggtgctcccggggctgggggcttcggggcccaggcgcccaagggaggctctgggtcggggcccaccatcgaggaggtggattagaggcttttctggctctcagggtgttggctagagacagactcttgatggctgctggtgcacgattcttatcaagttactccttctctccggagttcagtttaaagttacagccttttatacggtaattgatttgagtttgttacattttgtatgctcgtgggttttttatatattcaaattaaggttgcatgttctttgcgtttaatctaagtagctgtgtaaaaatggtgtttccttcctgcgaacacctcagcactgccaccctgtgtacagttttttccttgcatccctacaaactgagaaaaaaagttatcttttgtaacttaaacattcaaaataaaatgttacaagt

SEQ ID NO: 1191 - DNA, 2758 bp, Rattus norvegicus
catgagtgtacttctctcttggctaagaaagacagcaaagcaaagacttttaaagcgaagaagctggaaacaatcagaagaacaccatggaagaaacagagaaaaagattgcaacacaagagggtagattgttttccaagatgaaggtgtttctgctgtcattaacatgtgcatgtttaaccaaatcactatcaggagtatatatgaattccatgctcacacaaatagagagacaatttgatatctccacatctgtagctggattaatcaatgggagctttgagattggaaacctttttttcattgtatttgtgagttattttggaacaaaactgcacagacctgtggtgattggtattggatgtgtgattatgggcctggggtgtctcttaatgtcattacctcatttcttcatgggcagatacgaatatgaaacaacgatctcacctacaggcaacttgtcctcaaacagcttcttgtgtatggagaaccgaacacagaccttaaagccaacgcaagacccagcagaatgtgtgaaagaaatgaaatcattaatgtggatatgtgtaatggtaggaaatattatacgtggaattggtgaaactcctattgtgcccttgggtatctcttacatcgaagactttgccaaatcagaaaactctcctttatacattgggattttagaaatggggaaggttgctggcccaatttttggacttttgttgggatcttactgtgcacaaatttatgtagacattgggtctgtgaatacagatgacctgaccataacacccagtgatacacgctgggttggtgcttggtggattggctttttggtctgtgcaggagtgaatatcctgaccagcatcccctttttctttttgccgaaagcacttccaaagaaaggacaacaggagaatgttgctgtgactaaagatggcaaagttgagaaatatggaggacaagccagagaggaaaatcttggaatcactaaagatttcttgacgttcatgaagaggctcttctgcaatccgatttacatgcttttcatccttacaagtgtgctccaggtgaatggctttattaataaatttacgttcttgcccaaatacctggaacagcagtatggaaaatctactgcagaggcaatattcctcataggtgtttatagcttacctcccatatgcctcgggtatctaattggtggctttattatgaagaagtttaagattactgtcaagaaagctgcatacctagcattttgcctatcggtgtttgaatatcttctttttctttgtcactttatgttgacctgtgacaatgcagcagttgctggattaaccacctcttacaaaggagttcagcaccaactacatgtggagagcaaggtccttgctgactgcaacacaaggtgtagctgctcaacgaacacatgggatccagtgtgtggagacaatggtgtagcatacatgtcagcttgccttgcgggctgtaagaagtttgttggaactggaaccaacatggtgtttcaggattgcagctgcattcagtcattaggaaactcgtctgcagtcctgggtctgtgtaaaaaaggtcctgagtgtgccaacaggctgcagtactttttaatcttaacaataattatcagtttcatctactcacttacagccatacctgggtacatggtttttttgaggtgtgtcaagtctgaagagaagtcacttggagttggattacatacattttgcataagagtatttgctggtattcccgcacctgtttactttggcgctttgatagacagaacctgtttacattggggaaccctgaaatgtggtcagcgaggggcatgcaggatgtatgacataaacagtttcaggcacatttacctggggttgcctatagcactaagaggatcaagctatctgcctgccttcttcattctgatacttatgaggaaattccagttccccggggacattgactcttcagcaactgatcatacagagatgatgctcggagagaaggaaagcgagcacacagatgtgcatggaagtcctcaggtcgagaatgacggagaactgaaaacgaagctgtaatgagttttctactgccctgttcaaggccatgaacagaatgcacacttcccttcctcggaatcctgagagatacaataggaaccttctctttaaggacctcaacaattgtttttctcactataaaaataattgctgatatcatttttatagtgagaaaaacaataaaaataattgctgatatcattttcagaatttcaggtgatatttaagatttccctggggaagacttttatggtgacccccacactacactttaaagcttccttcattttcacataacattttctcttaactcaatcaagggaaatatgtgtttcccacacatctttaaatgagtataaaactttcctattcctgaaacagtatttaatttcattgaatttatggttcacagttggaagtatttagagctgaaaagatacattctcattaagccacattgaaaagttaacttttctatgttcaggatgtctccatatgtctatatgtaggagttctcaaatattattattattgtagacatgatgctcctagattagacttctcactcctgtgtcatttcctgtttctagtcccttctttcattactcctgtcacacagttgaatgttttgtttagagcactgacaaacttaatcaggttattaaaaatcacattag

SEQ ID NO: 1192 - DNA, 1227 bp, Rattus norvegicus
ggaattcgcaacgcctacacaaagatccctatcactgagcacccggaggcaaggctcagaaccccaggatcagcaacatggagttctcccgtccaccgctagtgcatgtgaagggtatcccactcatcaaatactttgcagagacaattgggccattgcagaacttcacagcctggcctgatgacttgctgatcagcacatacccaaagtctggtactacctggatgagtgagatcctggatatgatctatcagggtggcaagctagagaagtgtggccgcgcccccatctatgcccgggtacccttccttgagttcaaatgtccaggggttccctcaggtcttgaaactttggaagagacaccagccccacggctccttaagacacatctgcccctgtccttgctccctcagagtctgctggatcagaaggtcaaggtgatctacattgcccgaaatgcaaaggatgtggttgtctcctattataacttctacaacatggccaagctgcaccctgatccaggcacctgggacagcttcttggagaacttcatggatggggaagtgtcctatgggtcgtggtaccagcacgtgaaggagtggtgggagctgagacacactcaccctgttctctatctcttctatgaagacataaaggagaaccccaaaagggagatcaagaagattctagagtttttggggcgctctctacccgaggagactgtggattccattgttcaccacacatctttcaagaaaatgaaagagaactgcatgactaactacacaaccatccccactgagattatggaccacaatgtttctcccttcatgaggaaaggtactactggggactggaaaaataccttcactgtagcccagaatgagcgctttgatgcccactatgctaagacaatgacagattgtgacttcaagtttcgttgtgaactatgagtggattatggctatactgggaaccaaggcaaactgacacagcccatcatgatctcaagtaaaatgtgatgtgttcaatctacttgttgtatgcctagaggaaatctgagctaagagaataggattggggatgtggctgaggcagagggttttatcaacgcatgtcaggaaagcaatcagtcccaacacctaaaaagaacctaaagtacaaacatgcaaaaaatagtaagataaactatattttacctgaaagaataaatgccactgggaaatg

SEQ ID NO: 1193 - DNA, 1124 bp, Rattus norvegicus
cggcacgagctaacaccctgttctcagactcctccgcgcctctccgcctgtcctcaggatcatgaaggtcgccagtagcagtgccgcggccaccgcaggccccagctgttcgctgaaggcaggcaggacggcgggcgaagtggtgcttggtctgtcggagcaaagcgttgccatctcgcgctgcgctgggacgcgcctgcccgccttgctggacgaacagcaggtgaacgttctgctctacgacatgaacggctgctactcacgcctcaaggagctggtgcctaccctgcctcagaaccgcaaagtgagcaaggtggagatactgcagcatgttatcgactacatcagggacctgcagctggagctgaactctgagtctgaagtcgcgaccgccggaggccgggggctgcccgtccgggccccgctcagcaccctgaacggcgagatcagtgccttggcggccgaggtgaggtccgagtcagagtattacattattctcctgtgggaaactaaggccacgggaggggggtgtcccccttacttctcaggagcatagttatttaggggcgaccaataggaaaaagctcgcgctttcatcgtgcctcctggagtagagaagtgggaatgcctctcccctccagttctttccagtgggtctcatgccttatctcgctctggtgttcacaggcggcatgtgttccagccgacgaccgcatcttgtgtcgctgaggcggcgcactgaggaaccagatggactccagcccttcaggaggcaagaggaaaaaaagtgctctcggttccccagagcaacccggggaaagacactaccgcggccacgggactcttgacggatctgtccagggggtagagggttgatcaacggagtctcgccctctccacctttcagcctccagagactttgaggagggggttattcaaccccgtgtgtttctgtttttttgaaaaagcagacattttttttaaatggtcacatttcgtgcttctcagatttctgagaaaatgttttgtattgtatattacaatgatcactggctgagaatattgttttacaatagttcttatgggggtgggttttttgttgttattaaacaaacactttagat

SEQ ID NO: 1194 - DNA, 3711 bp, Rattus norvegicus
gaagctgctgcacctggagcacccacccctctgtagaggggagttgatcagaggcccacataaccgtaattacttgtgagcctctgattatagtacaacttgctggattagctcaccggattagccgctcaggtaacactcatttgactggggaaacccatgactcagctatcttttgggtaaataatttaacagtgagcccagcggagtattctccacgggtcagcctcagaagtgcctctgtctgttaagagaagccagggtgattggaggatcagcccgccagcaagctgctgcccccagatattgcaaagcctacagagccggcctggtgtcccagattagccaaagagcctggtgtgacaggatggatgcttctcctgagcccccgcagaagggcgggacactggtactggtccgacggcagccccctgtgtcccagggcttgctggaaacactgaaggccaggctgaagaagagctgcacctgcagtatgccatgcgctcaggctctggtgcaaggtctgtttcctgtcatacgctggctgccccagtaccgccttaaggaatacctggcaggtgatgtcatgtcgggattggtcattggcattatcctggtgccacaggccatagcctactcactgctggctgggttgcagcccatctacagtctctacacttccttcttcgccaaccttatctacttcctcatgggtacctcccgccacgttaatgtgggcatcttcagcctgctgtgtctcatggtgggtcaggtggtggaccgagaactccagttggctggctttgacccctcccaggattctctagggcccgggaacaatgacagcaccctcaacaacacagccacactgacagttgggctacaggactgtgggcgggactgccatgccattcgtatcgccactgccctcactctgatggccgggctttatcaggtcctcatggggatcctccggctgggcttcgtgtctacctatctctcgcaacccctgctcgatggctttgctatgggagcttctgtgaccatcttgacttctcaggctaaacacctgctgggcgtgcggatccctcggcaccagggcctaggcatggtgatccacacttggctgagcttgctgcagaacgtgggacaggctaatctgtgtgatgtggtcaccagtgccgtgtgcctggcagtgctgctgacagctaaggaactctcggatcgctatcgacactatctgaaagtgccagtgcccacagagctattagttattgtggtggccacgattgcgtcccattttggacagctccatacacggtttggctcgagtgtggccggcaacattcccactggttttgtggccccacagataccagaccctaagataatgtggagtgtggccctggatgccatgtccctggccctcgtgggctcagccttctccatctccttggcagaaatgtttgcacgtagtcatggctactctgtcagtgccaaccaagagctgctagctgtgggctgttgcaacgtgctgcctgccttcttccactgttttgccactagtgctgctctgtccaaaactctggtgaagatagccactggctgccagacccagttgtccagtgtggtcagtgctgctgtggtgttgctggtgctgctggtgctggcgccattgtttcacgatctgcagcggtgtgtgttagcttgcatcattgtcgtcagcctgaggggggcgctgcgcaaggtgaaggatctcccacaactttggcggctaagccctgcggacgcactggtctgggtggctactgcagcgacctgtgttctagtcagcatcgaggctgggctgttagctggggtgttcttctcactgctcagcctggcaggccgcacgcagcgtccacgggctgcccttctggctcgaattggagactcgaccttctatgaggatgctgctgagtttgagggcctcctgcccccgcccgaggtgcgagtgttccgtttcacaggtccgctctactatgccaacaaggatttcttccttcggtcactctacagtctgacagggctggatgctgggtactcagccaccaggaaggatcggggcacagaggtgggtgtcagtaacagaagtcttgttgaccgcaaggatctgggttcagtgagcagtggggatgggctggttgtacccctggcatttggtttccacacagtggtcattgactgtgcaccactgctgttcctggatgtggctggcatggccacattgaaggacctgcgcaaaaactacagggccctggacatcaccctgcttctggcttgctgcagtccctcagtgagagacacactgagaaaagggggcttccttggggaagaccagggaactgcagaggagctgctgttccccagtgtacacagcgctgtggagacagcatgtgcccgccgtgaggagctgatggctgctgactctgccctctagcagggcccgcttcctcaagagccaagacctgtgtccacgagccagtcctgagctcttttgtaggagtgacatgaatgataaagtcattatagataaatccttggaccgcctttgccctggagaagccagggaactccaagtaggaaaggaaagtgcagtacccttaacacattggaggattccaaacattcagtgattgaggcgctctacctctgagcccactgctgccccctggtgcctattcaaccctagtagttgcacccacacacatgattccctcagccaacacagtgcccagtttgatagtctgtttatgttgtcatctgaaacagagtcctgcaaattatatgacctccatgatgccaaaaggacactttcccattccctgaaccatcgggtaccagatgtgagctggatatgtggccacacctcaagggtctgaatttccgaaaggcctccttaggcctggtgctcatcttgattggacccttgcaaaggcagccacctgctccagagtcacagtccagtgtcactgtctaaccgatgtgactgacataacctcaacctgactttcgggcacaatgtcccaatacagcttatactggtaaccacaacgtggcgtatgtatggtacaaagccaggcacagtagacacttaccccattctgctgtacttctaagaaaacctcaggaggaaaccacctgtgctccatccagggcctgcctttggcacagccaagcagacattcccctcctcctctgcccaacaggatgctctaactggaagcacaccccagccctgtgcactaccatgattctcccccacccacagcccagcattgtgttccacagctggccccaaaaacgtcagctccaccatctcggctctcttaaaacaagctctgaccagcaattcccagggtacccatttcagcgtcacccacctggctgtgatgaggtccagcagccagtgtatccggacctgctcaatgccactgtgaggcacagcacctatgtaggcaaggttcagttgctggtcccaactaaggtcgtactggtcagcctggtcgtgaggcagtggggggctagggataggacaaagaagtgaagtgtttgtcctaagcaggggcctgcatcataccagactttacacatgttatcacctgactacctagacccttgaggatgaactgtgtatctccagaatgtatgataaagtagcccactaaccag

SEQ ID NO: 1195 - DNA, 2643 bp, Rattus norvegicus
gtgaccaggactcttcgacgtccagcacctcctttccgaagtacctggagcacctctctggggatggcaaagcatggtgtcctgaccagcggcggggagtcccaaggcatgaatgctgctgtccgtgctgtggtgcgcatgggaatgtacacgggggcccaagtgtactttatatacgagggttaccaaggcatggtggatggaggctccaatattgtggaagccaagtgggagtgtgtctccagcattctacaagtgggtgggaccatcatcggcagtgcccgttgccaagccttccgcagccgtgaagggcgtctgaaagccacctgtaacctggtacgcttgggcataaccaacctgtgcgtgatcggtggggacggaagtctcacgggagccaacctcttccggaaggagtggagcggtcttctggaagagctggctaagaatggtgagatcgattcggacacagtgaagaagcacgcctacctcaacgtggtgggcatggtgggctccattgacaatgacttctgtggcacagacatgaccatcggtacagattcagctctgcaccgaattattgaagttgttgatgccatcatgaccactgcccagagccaccagagaaccttcgtcttggaggtgatggggagatactgtggttacttggccttggtgagcgccttggcttgcggtgccgactgggtgttccttccagagtctccgccagaggaaggttgggaggaagaaatgtgcctcaaactctccgagaaccgtgcccgaaagaaaaggctgaatatcatcattgtgtctgaaggagcaatcgacacccaaaataagccaatcacctctgagaaaatcaaggagcttgtggtgacaaatttgggctttgacacccgggtcaccattcttggacatgtccagagaggagggaccccttctgcatttgacaggattttggccagccgtatgggagtggaggctgtccttgccttgctggaagctacccctgagaccccagcctgtgtcgtgtcactgagaggaaatcaagctgtacgcctgcctctgatggagtgcgtgcaaatgacccaggatgtacagaaagcaatggatgaaaggagatttgatgaagccgtaaaactccgaggaaggagttttgagggcaacctgaacacctacaagcgtcttgccattaaggagcctgatgacaagatccccaagagcaattgcaatgtagccatcatcaatgtaggggcacctgccgcgggaatgaatgcagccgtccggtccgctgttcgggttgggattgcagagggccacaagatgttcgcaatctatgacggctttgatggcctcgccaatggccaaatcaaagaaatcggctggggagatgtcggaggttggacaggacaaggagggtccattcttgggacgaaacgcaccctacccggaaagtacttggagaagatcgcagaacagatgcactcgaaaaatatcaatgcccttctgatcattggcggattcgaggcctacctgggactcctagagctggcagctgcccggaacaaacatgaggcattctgtgtccctatggttatggttcctgctactgtctccaacaatgtgccaggttctgatttcagcatcggggcagacacggctctgaacactatcacagacacgtgcgaccgcataaaacagtcagccagtgggaccaagcgccgggtgttcatcattgagaccatgggcggatactgtggctacctggccaacatggggggacttgcagcgggacgcgatgctgcctacatctttgaagaacaatttgatatccgagatttgcagtccaacgtcatgcacttgacggagaaaatgaagaccagcatccagaggggccttgtcctcagaaatgaaaactgcagtgtaaattacaccacggacttcatctaccagctctactcagaggaagggaaaggagtgtttgactgcaggaagaacgtgctaggccacatgcagcaggggggagcaccttctccattcgacagaaactttggaaccaaaatatctgccaaagctatggagtggatctcggccaaactgaagggctcccacggcacagggaaaaaatttgttagtgatgattccatttgtgtcctgggaattcagaagagagacctcctgtttaaaccagtggcagagctaaggaaggctactgactttgagcaccgtatccccaaacaacagtggtggctgaaactgctaccaatctcgaagatcttggcaaagtatgaggcaagctatgacatgtcagacgtaggcaagctggagccggtgcataaccacggagaactatcagccatctgattgaatatgccgtctcctgacctgcacacttacctagggaagcctgtaatgttctccagggaccacccctttttgtaacatagttatttatcagcactctatgcaagaattgttggccgagtattgtcagcagtaataatcagagagcatcacttgctataaccattgacgcaacagaccctaagacatgaaacccagcctcgcgcgattgatcacgtgtcagttttctactgtaccgggtactactgtcttgtgctttaccatgtgtgtatcttgtgggat

SEQ ID NO: 1196 - DNA, 1666 bp, Rattus norvegicus
cggcagccgagtcggattgagctgctgcagacgccaggccactccagccagcactgccgttttcacgccccggctgcagacagctaggaggctttatctagtttgaaccaggctgctggagctcgctccttccctctctttttttccacgaggctgtttttttatttggctgcaattgcatgaaatcccaatggtgtagaccagtggcgatggatctaggagtttaccaactgagacatttttcaatttctttcttgtcgtctttgctgggaactgaaaacgcttccgtgagacttgacaatagctctggtgcaagtgtggtagctatcgacaacaaaatagagcaagctatggatctggtgaaaagccatttgatgtatgcagttagagaggaagtggaggttctgaaggagcagatcaaagaactaatagagaaaaactcccaactggagcaggagaacaatctgttgaagacactggccagtccggagcagctcgcccagtttcaggcccagctgcagactggctcccctccggctaccacgcagccacaggggaccacacagccccctgcacagccagcgtcccagggctcaggatcaaccgcatagcctgctatgccccaacagaactggctgctgctgtctgaactgaacagaccgaagagatgtgctagtgagaagccgcctccagtcacccatttcattgctgtctgcgaaagagacgtgagactcacacatgctgttctcgctttctccccagtattaagcactcatatgcttttggcttgaagaaatatactagttgagtgaattaaaggttaaacagagagtgagcatggatgtaccctgtgcaacgtggcagatgtctgaggaatggtttgattgacgctgaggaggagctctgtgccttttcaaccctccccagccgcccactctactcccaagctctggggctcgcctgcatggggctcagaaggtgggctgctcctggattttgtgttctcctctccttcccttcaaagaatttgagaggccagaaacgagactgcaaagggggggatgcagtccttttacaaaaccgacaactgtcaccaaagcttataaaacaggacagtactgtccctcttttctgaaacatcagaagacacaaaactgttagtgacacaacggtgacaggtagctgggacctaggctatcttattatgaaggttgttttgcttgttgtatatttgtgtatgtagtgtaacgaatttgtacaatagaggaccgtaactactgttaggttgtacagattgaagtttagatgttccattggctgtctgaaaaggtgtggattgtccttcctagagagatctacttaaaaactgcttcgtgacaaaaaccacacctgaagaaattttaagaatttggcacagttagtcactttgtgtcacccggaatctagctgctgagtcttgcaaagtaaaccccctgttgactgatgtcagttgagctagtgaatgaatagatggagaaacgtcagtcagttgctgaggaagtggatttcccagtaggggtttctgcagctcacctgtatagtcctgcgcatgttccccacacagaacccactgtatttacctgttctacttgtcacctttcaataaagcatatcaaatgttgatacc

SEQ ID NO: 1197 - DNA, 1464 bp, Rattus norvegicus
atgcatcccttctacactcgggccgccaccatgataggcgagatcgccgccgcggtgtccttcatctccaagttcctccgcaccaaggggctcacgagcgagcgacagctgcagactttcagccagagcctgcaggaactgctggcagagcattacaaacatcactggttcccagaaaagccgtgcaagggatcaggttaccgttgtattcgcatcaaccataagatggatcctctgattggacaggcagcccagcggattggactgagcagtcaagagttgttcaggcttctcccaagtgaactcacactctgggttgacccctacgaagtgtcctacaggattggagaggatggctccatctgtgtgctgtatgaagcctcaccagcgggaggtagctctcaaaacagcaccaacgtgcaaatggtagacagcagaatcagctgtaaggaggaacttctcttgggcagaacaagcccttccaaaaactacaatatgatgactgtatcaggttaagatatagtctatggatggatcatcttataatggatggatagatttgattttttgctttgggtgggctcctcttggggatggattatggaataaccatgtcacagctgtgaagatctggcacaagatagagtggtaataatttttttttttaaagtgacagtgccatagtttggacagtacctttaagtgatttaagtagcctgtgagtccaagtaaaggatcactttatttggtagggagtgaagtcgcagggtggtttcagtttctcccagaccttatacccaatttgtcacaccagtccctttaaggaaattctgtatttcaaagaaccctcttttgcagtcagtcaaccttgcaggggaatttgcactatttacacttgaaagttaccagtaacttttttttggcagctcaataggaaagctcaatgttctaagcatggtagtactggaaatattacacggagacttttacctagcacttaaaaatgtataaatgtacataaagacacttagtacgcatgacctgggggaaatggtcagaccttgtgtttttggctttgagagtagcaagtgaccggaatctgccatgacaacaggcttttaaaagacccttacaaagacactgtctcaactgtggttagcaccagccagctctctgtacattcgcttgtagttttctaagattgagtgagtaaacttcttatttttagaaagtggaggtctggtttgtaactttccttgtactcaattgggtaagagtctttttccacaaaccgccatctattttgtgaactttgttagtcatcttttatttggtaaattatgaactggtgtaaatttgtacagttcatgtatattgattgtggcaaagttgtacagatttctatattttggatgagaaatttttcttctctctataataaattgtttcttatcttggcatttt

SEQ ID NO: 1198 - DNA, 800 bp, Rattus norvegicus
tccaagggacaaaagaaaagaaaagaaaaaaatactaaaaaacaaacaaacaaaaaaaaaaaacaaaagaaaaaaatcacagaacagatggggtctgagactggatcttctatcattccaataccaaatccgacttgaacaagactggacttacaaaatgccaaggggtgactggaagtttgtggatatcagggtatacattaaatcagtgacctggggggagggaagaccagagttcccttgaattgtgcttcaatgatgcaatatacatggaaagaccaccttgtatgctctttgccttctaaaaagccattatgacgtcagaggaagaggaagcaattcaggtacagaacgtgttctaatagcctaaacgatggtgcttggtgagtcgtggttctaaaggtaccaaacgggggagccaaagttctccaactgctgcatactttgacaaggaaaatctatttttgtcttccgatctacatttatgacctaagtcaggtaaataagcctggtttatttctgtaacattttttatgcagacagtctgttatgcactgtggtttcagatgtgcaataatttgtacaatggtttattcccaagtatgcctttaagcagaacaaatgtgtttttctatatagttgccttgccttaataaatatgtaatataaatttaagcaaacttctattttgtatatttgtaaactacaaagtaaaaaaaaaatgaacattttgtggagtttgtattttgcatactcaaggtgagaaataagttttaaataaacctataatattttatctg

SEQ ID NO: 1199 - DNA, 1715 bp, Rattus norvegicus
ttaaaatcaggctctttttgtcttttaattgccgtctcgagacccaactccgatgtgttccgttaccagcgaccggcagcctgccatcgcagcccctgtctgggtggggatcggagacaagtcccctgcagcaacagcaggcaaggttatataggaagagaaagagccaggcagcgccagagggaacgaacgagccgagcgaggaagggagagccgagcgcaaggaggagcgcacacgcacacacccgcgcgtaccagctcgcgcacagaccggcgcggggacggctcgcaagtcctcaggttccgcggacgagatgctgctgctgctggccagatgttttctggtggcccttgcttcctcgctgctggtgtgccccggactggcctgtgggcccggcagggggtttggaaagaggcagcaccccaaaaagctgacccctttagcctacaagcagtttatccccaacgtagccgagaagaccctaggggccagcggccgatatgaagggaagatcacaagaaactccgaacgatttaaggaactcacccccaattacaaccccgacatcatatttaaggatgaggaaaacactggagcagaccggctgatgactcagaggtgcaaagacaagttaaatgccttggccatctccgtgatgaaccagtggcctggagtgaagcttcgagtgactgagggctgggatgaggacggccatcattcagaggagtctctacactatgagggtcgagcagtggacatcaccacgtctgacagggaccgcagcaagtatggcatgctggctcgcctggctgtggaggctggattcgactgggtctactatgaatccaaagctcgcatccactgctctgtgaaagcagagaactccgtggcggccaaatctgacggctgcttcccgggatcagccacagtgcacctggagcagggtggcaccaagttagtgaaggatctaagtcccggggaccgcgtgctggcggctgacgaccagggccggctgctgtacagcgacttcctcaccttcctggaccgcgacgaaggtgccaagaaggtcttctacgtgatcgagacgcgggagccgcgggagcgtctgctgctcactgccgcgcacctgctcttcgtggcgccgcacaacgactccgggcccactccgggaccgagcccactcttcgccagccgcgtgcgtccggggcagcgcgtgtacgtggtggctgaacgcggcggggaccgccggctgctgcccgccgcggtgcacagcgtaacgctacgagaggaggcggcgggtgcgtacgcgccgctcacggcggacggcaccattctcatcaaccgggtgctcgcctcgtgctacgcagtcatcgaggagcacagctgggcacaccgggccttcgcgcccttccgcctggcgcacgcgctgctggccgcgctggcacccgcccgcacggacggcgggggcgggggcagcatccctgccccgcaatctgtagcggaagcgaggggcgcagggccgcctgcgggcatccactggtactcgcagctgctgtaccacattggcacctggctgttggacagcgagaccctgcatcccttgggaatggcagtcaagtccagctgaagtccgacgggaccgggcagggggcgtgggggcgggcggggcgggaagcgactgccagataagcaaccgggaaagcgcacggaagga

SEQ ID NO: 1200 - DNA, 2638 bp, Rattus norvegicus
cacaatcttcaatgagtagacatattcctcagttctgtggtgttctcggtcacacatttatggagtttctgaagggcagtggagactactgccaggcacagcacgacctctatgcagacaagtgaactgtagaaattcattactactccaccaagaagcccccataagagtggatagcctggacacagtcgtgttgaattgaaatctgcagagcattttccaagagctcagacctggatggggtaaacctcagtgcacttcctctgtatcgcctcagtattcctggattgaagagtcactgcttcttgtgaggaggttcatttcattgcccgtttctcccgactcatactcaaagcactgagaatttcaagtggagtatattgaatattgaagtagacttcaggttgttttttggttttgttttggttttttgttttgttttgttttgttttgttttggttttcagtttttgtttggaatcatttctgtattcaattttttaattctttcataaccctattgggtgtttttttaaactaaattaacatggctcgaatgaaccgccctgctcctgtggaagtcacatacaagaacatgagatttcttattacacacaatccaaccaatgcgaccttaaacaaatttatagaggaacttaagaagtatggagttaccacaatagtaagagtatgcgaagcaacttacgacactactcttgtggagaaagaaggcattcatgttcttgactggccttttgatgatggtgcaccaccatccaaccagattgttgatgactggttaagtcttgtgaagattaagtttcgtgaagaacctggttgctgtattgctgtccattgtgtcgcaggccttggcagagctccggtgcttgttgccctagcattaattgaaggtggaatgaaatatgaagatgcagtacaattcataagacaaaagcggcgcggagcttttaacagcaagcaacttctgtacctggagaagtaccgtcctaaaatgcggctccgcttcaaggattccaacggtcatagaaacaactgttgtattcaataaaactggggtgcctgatgccattgccttggaagaggaacttcagatgggacctgatttgttatttacccaatgtgtccacttacctgtggaagctccaggggaatattgaaaaagttttaccaggccacaagcttgacagaattgcaacctctataattgggctatgatcaacacgtttggacacttagcaaaagatttttgctggtcagcatttaaaatgtgcttattatttgtaccaattgacctttcctaaaataaggtattgagtaatgtcattaaatgtactcctgtgccagaatattattagtctataaggaatttagaaggattaggtgccaaaatacccagcacaatacttgtatatttttagcatcatacagaaccaaaattccaagaactaagaactctccagaccttccatggtgtattccttcagtcatttcaaacaccgcagggcttctcttgttatctgcctgctcactctatgtttacatctcccacacttacaccagaacacatcaggtttgcttagctatcttttaagtcttgcaatgattatttaatgtctctgtcttattttgtgctgttttgggaaacctccatttgaaaatcaactttgttacagaagcacatatcttcaataatgtctccagacaaaaagccttatagttaatttaatgtttgcactcgggtgcaacctgacagggagggcctgaacaagaaaggagaggaggctattaaatatttttagtaatatgttgcctttgtcttgtgcagaacatgtagagtatgctctttaatttagtaaatatttttaagacgtagagatacattgttgtagctaaccacttaatcaaaatttctgaaattcttgtgttttccatacctatctgaggttttccaacttgtttgaattatggttttccccttctcttcccaatctcttgcaaaaaagtaaaagtgggatctgctagtgaactgagcagaaatattttatacgccttttgagctatgtaacttaataattggatacttgatcatttgttttattatgtaatcgataaaatggtgatgtgtattaatgttagttcaaccatatatttatactgtctgggaatgtgtggttatagttctgtgggagaaatagtttgtcagtgttcaccagcttgtaaaaacttagtgcgagagcttcaacatctaaataaatgatgaaacgcattcgtcactgaggtcactttgcttaaaattaacttaatttgtagaaaacagtggattcaattattatcatttcagtttatggacaaatttgttagggttaccaagtgcgtttaaaaattgctctttaaaggtctagataattgtgaatcaattgaatgttgggtaccaagggaaaacggtttgtaatagttgatgaccttgatttttaattcaattccaccagtcacttgtagctttatgcagtttccaatccacttttctcatttttaagtttattacttacctgtatatattttgaaattaatttgaacctgcgtatttggcacatgatggcttataaattttaactttc

SEQ ID NO: 1201 - DNA, 1118 bp, Rattus norvegicus
tctcttgcaggacttcctcgggccttacgtgttcttcctttttgctggggtggtcctggtcttcaccctgttcacattttttaaagttccagaaaccaaaggaaagtcttttgacgaaattgctgcagaattccggaagaagagtggttcggccccaccacgcaaagccactgtacaaatggaattcctggggtcatcagagactgtgtgaggatgagctgcctaaaatccaggaacagaccagaagggaaccatgtgctccctcttaactcgaatccttcatgagtgtaggactacacccaggaggatcatttattcccttttgaagaatttgtacagactccgattagaaacgtcaacatatatcattaccaaagaaagtatttttttaacttagagaatctattttggatggtaaaactcttcagtaaaccagaggctgctctgcttctctacagggaaagcacgttataagcttcctcgcctggttctactgaaattggagagctttcaacatatcactgctcttaaaagcacgtgactaagaaatctgaagctacaactgatatctatatatttaaatataattccattggaattttcttagccacagatctgatgctgaaggacctatggctggcaaggctcacactcaaactgacgtctctgttacccacctcggtttctctcacatgtactagactttgtgttttgttttaaactatttttctgcatttttatagagaactcctgagtatgttaagctatatttgtaatgaaaagcctcttctttatagctaccaaaatcttcatgtagtgagagaaaacgtttcagtttctttgatgtatattgtaaggttaaacgctcgagtttttcctagccattgagtctagattatcagttaatattagcatctaaaccatgttagttactctccatttcagtcctttgtattgtacttttacttgttttttttttttaattgcccatggcacacacttaaaaccatcaggagtcaggcattttgcatattgcctccaaaatctaataaactggaccaatcacagggaaatctggaataaagagctgctctatttgttcattttttaaaaaaaaa

SEQ ID NO: 1202 - DNA, 515 bp, Rattus norvegicus
gtgcaggcagagattaggaagtcatggagccgctggacactggcgttggacttcaagcgcaaagcacgaagtgggagtagcagctacagctatggcccaatggtgtctcacacgagtgtgaccaatgtgggcccccgtgcaggactcagcctccccctcagcccccgcctgcctcctgccactaccaatggccactcccagctgcctggccatgccaagccaggggctccagccactgagactgaaaccctaccagtcactatggcggttcccaaggacgatggattccttaacggctcctgctcaggcctggatgaggaggcctccgggtctgcgcggccgcctccattgttgcaggaagaatgggaaacagtcatgtgactgggcactagggggctagactgctggcctgggcacatggacagatggaccaagaagccagtgtttggctggttgtctattcgggactggaccaggaagataacaaaaggaaaaaagaaaaaaaaaaaaaaagg

SEQ ID NO: 1203 - DNA, 711 bp, Rattus norvegicus
gggactcgcacttgcaatatgactttggaggaattctcggccgcagagcagaagatcgaaaggatggacacggtgggcgatgccctggaggaagtgctcagcaaggctcggagtcagcgcaccataactgtcggcgtgtacgaggcagccaagctgctcaacgtagacccggacaacgtggtcctgtgcctgctggctgcggatgaagatgacgaccgggacgtggctctgcagatccatttcaccctcattcgtgctttctgttgcgagaacgacatcaacatcctgcgggtcagcaacccgggtcggctggcagagctgttgctactggagaacgacaagagccccgctgagagcgggggcctggcgcagaccccggacttacactgtgtgctggtgacgaacccacattcatcacaatggaaggatcctgccttaagtcaacttatttgtttttgccgggaaagtcgctacatggatcagtgggtgccagtgattaatctccccgaacggtgattccccgaacggtgatggcatctgaatggaaataactgaaccaaattgcactgaagttttgaaatacctttgtagttactcaagcagtcactccccacgctgatgcaaggattacagaaactgatgtcaaggggctgagttcaactacaggagggctaggagatgactttgcagatggacagagaggtgaaaata

SEQ ID NO: 1204 - DNA, 3700 bp, Rattus norvegicus
ccaagaggaagaaacatgaagtttttgctgcttagtgcacttttatttttgcatagttccttagcttggacaagagaaaagcattattacatcggaattactgaagcagtttgggactatgcttctggcagtgaagaaaaggaacttatttcagttgacacggaacagtccaatttctatcttcgaaatggtccagatcgtattggaagaaagtataagaaggccctttattctgagtacacagatggcacctttacgaagactatagacaaaccagcctggctagggtttttaggccctgtcatcaaagctgaagttggagacaaagtttctgttcacgtaaagaactttgcctctaggccctacacttttcatgctcatggggtaacttacaccaaggcgaacgagggggccatctaccctgacaacaccactgattttcaaagagccgatgacaaactgtttcctggacagcagtatttgtacgtgctgcgtgccaatgagccaagtcctggcgagggagacagcaattgtgtgaccaggatttaccactctcatgtggatgctccaaaagatattgcatcaggactcataggaccgttgatactctgtaaaaaaggttctctgcataaggaaaaagaggaaaatattgaccaagaattcgtactgatgttctctgtggtggatgaaaatctcagctggtacctagaagataacatcaaaaccttctgctctgaaccagagaaagtcgataaagacaatgaagacttccaggaaagcaacaggatgtactctataaatggatatacatttggaagcctcccagggctctcgatgtgtgcagaagacagagtgaagtggtacctttttgggatggggaatgaagttgacgtgcattcagagctctttcatggtcaagccctgaccagcaagaactatcatactgatataatcaacctgttccctgccactctaattgatgtttctatggtggcccagaatcctggagtctggatgctcagttgccagaacctgaaccatctgaaagctggtttgcaggcctttttccaggttcgtgactgcaacaagccctcaccggacgacgatatccaagacagacatgtgagacattattacatcgctgccgaggagaccatttgggactatgctccgtctgggacagacaccttcactggagagaacttcaccagtctgggaagtgattcaagggtcttttttgagcaaggtgctacaagaattggtggctcttataaaaaattggtttatcgtgagtacacagatgattccttcacaaaccggaaggaaagaggccctgatgaggaacatcttggaatccttggtcctgtcatttgggcagaagtaggagacatcattagagtcacctttcataacaaaggacaatttcctctcagcattcagccaatgggggtaagattcaccaaggaaaatgagggaacatactatggcccagatggccgttcctcaaagcaagcctcccatgtggctcccaaagaaacctttacgtatgaatggactgtccccaaagaaatgggacccacttatgcagatcctgtgtgcctatctaagatgtattattctggagttgacctcaccaaagatatatttactgggcttattgggccaatgaaaatatgcaagaaaggcagcttacttgcagatgggagacagaaagatgtagacaaggagttctacttgtttgcaacagtgtttgatgagaatgagagtttactcttggatgataatatcagaatgttcacaactgcacctgagaatgtggacaaggaagatgaagactttcaggagtccaacaagatgcactccatgaatggattcatgtatggcaatctgcctggcctcaatatgtgcctaggagaatccatcgtgtggtatttgttcagcgctggaaatgaggcagacgtgcatgggatatacttttcaggaaatacctatctgtccaaaggagaaagaagagacactgcaaatctgtttcctcataaaagtctcacccttctcatgacacctgacacagaagggtcttttgatgttgagtgtcttacaacagatcactacaccggcggcatgaagcaaaagtacactgtgaaccagtgcaaggggcagtttgaagatgtcactctctaccagggagaaaggacctactatattgcagcagtggaggtggaatgggattattcaccaagcagggactgggaaatggagctgcaccatttgcaagagcaaaatgtttcaaatgcatttttggataaggaagagtttttcataggctcaaagtacaagaaggttgtgtatcgagagtttactgacagcacattcagagaacaggtgaagagaagagctgaagaggagcacttgggcatgctcggtccactgattcatgcagatgttggagccaaagttaaagttgtctttaaaaatatggcaacaaggccatattcaatacatgcccacggagtgaaaacaaagagttctacagttgctccaacgttgccaggtgaagttcgcacttatatatggcaaattccagaaagatcaggtgctggaacggaggattcaccttgtatcccatgggcttattactcaaccgtggatcgagttaaggatctctacagtgggctaataggcccattgattgtttgtcggaaatcttatgtgaaagtattcaatcctaaaaagaaaatggagttttcccttttgtttctagtttttgatgagaatgaatcttggtacttagatgataacatcaatacataccccgatcaccctgagaaagataacaaagacaacgaggaattcatagaaagcaataaaatgcatgctatcaatgggaaaatgttcggaaacctccaaggtctcacgatgcacgtgggagatgaggtcaactggtatgtgatggctatgggcaatgaaatagacctgcacactgtacacttccacggccacagcttccaatacaagcacaggggaattcatagttctgatgtctttgactttttccctggaacataccaaaccctagaaatgtttccccaaacgcctggaacctggttactccactgccatgtgactgaccatattcatgcggggatggtaactacctacactgttttaccaaatcaagagactaagtctggctgaaagaaataaattggtgataagtggaatacgagcacaatgacgttgttttaaacatttaaaaaaatcaaagccacacaaatgttcatttgtgagggaattggtaatgccgatggacagatgaacagactgtatcatgacatgtatttgtttgctgggtaacagaatcgctttacatagtccacttacacctgcactgaaaggactctgaaaagtggaaaaaaataagcaaaaccgtatgatcagatgctgtccttgactgtcctcacaggatcactataaagtccactaaactgtctccaactcttctcatcaagtcctctaacaaaccatggggtaagagggtatagaaaagaaggaaagatgaagataccaagatgcactttgtaaaaatctgaaaaacagttgaaggatgctctcggaaaatagagaaagtcaggatccaattatgttacattttgaaaaaatgaaatggagataataaagtaataaattttaaaatgccaat

SEQ ID NO: 1205 - DNA, 15438 bp, Rattus norvegicus
aggagccagcgggtagtgctgaacaagactcctgttccggagcggagtaacctgcctgtgcccgctgcgacgcgcgcccacctcccggggaaggaacggcgaggcccggggccgtctccgcgatggagcgcggggccgcagcggcggcgtggatgctgttgctggcgatcgctgcctgcctggagccagtcagtagccaagaatgcggcagtgggaattttcgctgtgacaatggatactgtatccctgcgtcctggaggtgtgatgggaccagagactgtttggatgacacagatgaaattggctgtcctcccaggtcctgcgaatcaggccttttcctgtgtcctgctgaggggacctgcatccctagctcctgggtgtgtgacgaggataaggattgttcggacggtgcagacgaacagcaaaattgtgctgggaccacgtgctcggctcagcagatgacgtgctccaacggtcagtgtattccgagcgaatacaggtgcgaccatgtcagcgactgccccgacggctctgacgagagaaactgccattatccaacatgtgatcaacttacttgtgccaatggagcctgctataacacgagtcagaggtgtgaccaaaaagttgactgcagggattcctcggacgaagctaactgcactaccctgtgttcgcaaaaagaatttgaatgtggcagtggagagtgtatccttcgcgcctacgtctgtgaccatgacaatgactgcgaagataacagcgatgagcgcaattgcaactatgacacctgcggaggtcaccagttcacttgctccaatggccagtgcatcaaccagaactgggtttgtgatggagatgacgactgccaagattctggtgatgaagatggatgtgaaagtaaccagagtcatcataggtgttacccaagagaatgggcgtgtcctgggtctggacgatgcatctcaattgataaagtttgcgatggagttcctgactgtccagaaggagacgatgagaacaacgtcacaagcggaagaacctgtggtatgggtgtctgctctgtcttaaactgtgagtaccagtgccatcagacgccatttggaggagaatgcttctgccccccaggtcatattatcaacagcaatgacagccgtacttgcattgatttcgacgactgccagatatggggaatttgtgaccagaagtgtgaaaaccgacagggccgtcatcagtgcctctgtgaagaagggtatatcctggagcgagggcagcattgcaaatccagtgactccttcagtgcagcctctgttatcttctccaatggtcgggatttgctagttggagatcttcatggaagaaacttccggattctagcagagtctaagaaccgaggaatggttatgggagtggattttcactatcagaaacacagagttttttggacagaccccatgcaggaaaaggtgttttccactgacatcaatggcttaaatacccaagaaattcttaatgtttctgttgacactccagagaatctggctgtggattggattaataataaactttatctggtagagacaaaggtcaaccgcattgacgtggtcaacttggagggaaatcagcgtgttactctcataactgaaaacttagggcatcctagaggaattgcccttgatccaactgtgggctatttgtttttctcagattggggaagcctctctgggcaacccaaggtggagagagccttcatggatggtagcaatcggaaagacctggtaacaaccaaagtggggtggcctgctgggatcactctggatctggtgtccaagcgagtttactgggtggattctcgttatgactacattgaaactgtaacatatgacggaattcaaaggaagacggtagctcgtggaggctcccttgttccgcatccctttggaataagcttatttgaggaacacgtgttctttactgattggacaaagatggctgtgatgaaagccagcaagttcacagaaaccaaccctcaagtgtaccaccagtcttccctgaggcctcacggagtgacggtttaccatgccctcaggcaacccaatgccaccaatccgtgcgggagcaacaatgggggctgtgcgcaggtctgtgtcctcagtcacaggacggataatggtggcctgggctaccggtgcaagtgtgaattcggctttgaactggatgatgatgagcaccgctgtgttgccgttaagaacttcctgctcttctcatcgaaaacggctgtgcgtggaatcccattcaccctctccacccaggaagatgtcatggttcctgtcacagggagtccatccttcttcgttggaattgattttgatgcccaacacagtactgtcttctattcagatttgtcaaaagacataatttataaacaaaaaattgatggcacaggaaaagaggttatcacagcaaaccggttggaaagtgttgagtgtttgacttttgactggatctcaaggaatctttactggacagatggaggactaaagagtgtcactgtcctgaggctggctgataagtcccgacgacagataatcagcaacttaaacaaccctcgttccattgtggtgcatccgaccgctgggtatatgttcctgagtgattggttccgtcctgcaaaaattatgagagcatggagcgatggttctcacctaatgcccatagtcaatactagtctggggtggcccaatggcttggccatcgattggagtgcttcacgattgtactgggtagatgccttttttgataagattgaacacagcacccttgatggtttagatagaaaaaggctgggccatgtagaccagatgactcatccatttggactcaccgtttttaaagataatgtgttcataacagactggagactgggtgctattattcgagtgaggaaatcagatggtggtgatatgacagttattcgaagaggcatcagcagcgtaatgcacgtgaaagcctacgatgctgacctccagactgggtctaactactgcagtcagaccacccacgccaacggtgactgcagccacttctgcttcccggtcccgaacttccagcgggtgtgcggctgtccctatggaatgaagcttcagagggatcaaatgacttgtgagggagacccagcccgagagccacccacacagcagtgtggctccctctcctttccctgcaacaatggcaagtgtgtgcccagtttcttccgctgtgatggagtggacgattgccatgacaacagtgatgagcatcagtgcggggtgtttaataatacttgctcaccttcggctttcgcctgcgtccgcggtggacagtgcatccctggccagtggcactgtgacagacagaatgactgtttagacggcagtgatgagcaaaactgccccacacatgccacgtcgtccacttgcccgtccacctccttcacctgcgacaatcacgtgtgcatcccaaaagactgggtctgtgacacagacaatgattgctcggatggctcggatgaaaagaactgccaagcttcagggacctgccagcctacacagtttcggtgccctgaccaccgatgcatcagcccgctgtatgtctgtgatggggacaaggactgcgcggatgggtctgatgaggcgggctgtgtgttaaactgtacgagtgcccagttcaaatgtgccgatgggagttcttgcattaacagcaggtaccgctgcgatggggtttacgactgcagggacaactctgacgaggcaggctgccccaccaggcctcccggcatgtgccacccggatgagttccagtgccaaggagacggtacatgcatccctaacacctgggagtgtgacgggcatccagactgtatccacgggtccgacgagcacactggctgtgttcctaagacctgctcgccgactcatttcctctgtgacaatggaaactgcatctacaaagcgtggatctgtgatggggacaatgattgtagggatatgagtgatgagaaggactgtcctacccagccttttcactgtcctagcacgcagtggcagtgcccgggctacagcacctgtatcaatctgagtgccctgtgtgacggcgtctttgactgtccgaatgggactgacgagtccccactttgcaatcaagacagctgctcccattttaatggtggctgtactcatcagtgcatgcaagggcccttcggagccacatgcctatgcccattaggataccaacttgccaatgataccaagacctgtgaagatatcaatgagtgcgatattccaggcttctgcagccagcactgcgtcaacatgagaggttccttccggtgcgcttgtgatccagaatatacgctggaaagtgatgggcggacttgcaaagtcacaggatctgaaaatccgttgttagttgtagcaagtcgtgacaaaatcattgtggacaacatcactgcccacacgcacaatctctactcgttggtccaggatgtttcttttgtggttgctcttgattttgattcagtcactggtcgtgtcttctggagtgacttactgcagggtaaaacctggagtgtctttcaaaacggaacagacaagagagtggtccatgacagtggcctctctgtgacagaaatgattgcagtagattggattggtcgcaacctttactggacggactatgctcttgaaacaatcgaagtttctaaaattgatggaagtcacagaacagtactgatcagcaaaaatgtcacaaaaccgaggggactcgcgttagatcccagaatgggtgacaatgtaatgttttggtctgactggggccatcaccctcgcattgagcgagccagcatggatggcaccatgcgcacagtcattgtccaggaaaagatctactggccctgtggcttaagcatcgactaccccaaccgcctcatctacttcatggatgcctatcttgactacattgaattctgtgattacgacggacataaccgaaggcaggtcattgctagcgatttggttctccaccatccgcacgccctcactctgttcgaagactttgtgtactggactgaccgtggtactcggcaggttatgcaggccaacaagtggcatggggggaaccagtcagttgtaatgtacagcgttcaccaaccgcttggaataactgccattcatccttcaaggcaaccaccttcccggaatccatgtgcctctgcctcttgcagccatctttgcctgctttctgcacaggcgcctagacattattcttgtgcttgcccttcaggatggaacctctccgatgattctgtcaactgtgtgagaggtgaccaacctttcttgatgtccgtaagagacaatataatttttggaatctcccttgatcctgaggtgaagagcaatgatgccatggtccccatatcagggatacagcatggttatgatgttgaatttgatgactctgagcaattcatctactgggttgagaatccgggtgaaattcacagagtgaagactgatggcagcaacaggacagtgtttgctcctctgtccctgctggggtcttctttaggcctggccttggactgggtatcaaggaacatttattataccactcctgcaagtcggtccattgaggtgttgacgctcaagggagatacgaggtatggaaaaaccctgattgccaatgacggcacccccctcggagttggtttccccgttggcatagctgttgatcctgcacgtgggaaactatattggtcagaccacgggacggacagtggggttcctgccaagatcgcaagtgctaatatggatggaacatctttaaaaattctcttcactgggaacctgcagcatctggaggttgtcaccctggacattcaggagcagaagctgtactgggcagtcaccagcagaggcgtgattgagagaggaaatgtggacggtacagagaggatgatcctggtgcaccatctggcccacccatggggccttgtggtctatggctccttcctttactactctgatgaacagtatgaggtcattgagagagttgacaagtcctctgggaataacaaagtcgtcctcagagataacgttccgtacctgaggggtcttcgggtttaccaccgccgcaatgccgctgactcttccaatggctgtagcaacaaccccaacgcttgccagcagatctgcctgcccgtgccaggtggaatgttctcctgcgcctgtgccagtggctttaagctcagccctgacggtcgctcctgttctccatataactcgttcatggtcgtttccatgctgcccgcagttagaggctttagcttggagttgtctgatcactcggaggccatggtgcccgtagctggccaaggacgaaatgttctgcatgcggacgtggatgttgccaacggctttatttactggtgtgattttagcagctctgtaagatcctctaatggaattcgtagaatcaaacccgacgggtctaattttaccaacgtcgttacctatggcattggggcaaatggaatccggggtgttgcactggactgggcagcaggaaatctttattttaccaatgcctttgtgtacgaaaccctgatagaagtgttacggatcaataccacgtaccgccgtgtactcctcaaagtctcagtggatatgccccggcatattattgttgaccccaagcatagatatctcttctgggccgactatgggcagaagccaaagatcgaacgctcttttcttgactgtaccaatcgaactgtccttgtttccgaaggcattgtcacccctcggggcttggccatggaccatgacactggctatatttattgggttgatgactccttagatttaattgccaggatccatcttgatggaggagaatctcaggtggttcgctatggcagccgttacccaactccctatggcatcactgtgtttggagagtctatcatttgggtggatagaaacttgaaaaaagtcttccaagccagcaagcaaccagggaatacagatccacccgtagtgataagagataagatcaacctgctccgtgacgtgaccatctttgacgagcacgcccagcccctctcaccagcagagcttaacaataacccttgtctgcaaagcaatggtgggtgttcccacttttgctttgccttacctgagttgcctactcccagatgtggatgtgcttttgggactctgggaaatgatggcaagagctgtgctacctcccaagaagatttcctcatctattccttaaataattccctgagaagtttacactttgaccctagagaccatagcctacctttccaagtgataagtgtggcgggaactgccattgcactggattatgaccgtagaaacaatagaatcttcttcacacaaaagctaaactctctccgtggccagatttcctatgtcagcctgtattcagggagcagctctccaactgtcctgctgtcaaatataggggtgactgatggcattgcctttgattggataaatagaagaatttattacagtgacttttcaaatcagacaataaattccatggctgaagatggatccaatcgtgctgtgattgcccgtgtttccaaacccagagctattgtattagatccttgccgagggtacatgtattggactgactggggtaccaacgccaaaatcgagagagccacactgggaggaaacttccgggtccccattgtgaacaccagcttggtttggcccaatggactcgctttggaccttgagactgaccttctgtactgggcagatgctagcttgcagaaaatagaacgcagtactctcacgggcacgaaccgagaagtcgttgtcagcactgcctttcattcctttggcttgactgtctatggccagtacatttactggacagacttgtacaccagaaaaatctaccgggctaacaagtacgacgggtcagacctggtagcaatgaccacacgtttgcccacccagcctagtggtatttccacagtggtcaaaacccagcggcagcagtgtagcaatccttgtgaccagttcaacggaggatgcagccatatctgtgctccaggtccaaatggagctgagtgtcagtgtcctcacgaaggcaactggtatctggccaacgataacaagtactgcgttgtggacacggggacccgctgtaatcaactccagttcacctgcctcaatgggcattgtattaatcaggattggaaatgtgacaatgacaacgactgtggtgatggcagtgatgagcttcctacagtctgtgcctttcacacctgccgatcaacagccttcacttgtggcaacgggcgatgtgtgccataccactatcgctgtgattactacaatgactgcggggacaacagcgacgaggcaggttgcctgttcagaaactgcaacagcaccacagagttcacgtgcagcaatgggcggtgcataccgctcagttatgtctgcaatggcataaacaattgccatgacaatgacacctcggatgagaaaaactgccctccccacacttgcccgccggatttcacaaaatgccagaccacgaatatttgtgttccccgagctttcttgtgtgatggagacaatgactgtggagacgggagtgacgagaaccccatttactgcgcctcacacacatgccgcagcaacgagttccagtgcctctcccctcagcggtgtattccaagctattggttctgtgacggtgaagccgactgtgcagatggctcggatgaacctgacacttgtgggcattctgtgaacacctgcagggccagtcagttccagtgtgataatggcaggtgcatctcaggcaattgggtctgtgatggtgataacgactgtggggacatgagtgacgaggaccagcggcatcactgtgagcttcagaactgttccagcactcagtttacctgtgtcaacagcagacctcccaacaggaggtgcatcccacagtactgggtctgtgacggtgatgcggactgctcggacgccctggacgagctgcagaattgcaccatgagaacctgctctgcaggggagttcagctgtgcaaatggacgatgtgtcaggcagtcattcaggtgtgatcggcgcaatgactgtggagactacagtgatgagaggggctgctcgtacccaccctgccatgcaaatcaatttacgtgtcagaacgggcggtgtatccctaggttctttgtttgtgatgaggacaatgactgtggagatggttctgatgagcaggagcacctgtgtcacaccccagaacccacatgcccccttcatcaattccggtgtgacaacgggcactgcatcgagatggggcgagtctgtaaccatgtggacgactgctcagacaacagcgatgagaaaggctgtggcattaacgagtgcctagattcttcaatcagtcgctgtgaccacaactgtacagataccataactagtttctactgttcctgtctccctggctacaagctcatgtctgacaaacgctcttgcgtggatattgacgaatgcaaggagtcaccccagctctgtagccagaagtgtgagaatgtggtaggctcctatatttgcaagtgtgcccctggctacatccgtgagccagatgggaagagctgccggcagaatagtaacatcgagccctatctcatctttagcaaccgttactatataagaaacttaactacagatggctcatcttactccctgattttgcaaggattgggcaatgttgtggccctggactttgatagagtagaaaagaggctgtattggattgatgcagagaagcaaatcattgagaggatgtttttgaataagacaaaccgggagaccatcataaaccacaggttaagacgtgctgaaagtctggctgtagactgggtcagcagaaaactctattggttggatgccatcttggactgcctgtttgtctctgaccttgaaggtcgacaccgcaaaatgatagcccagcactgtgtggatgctaacaataccttctgctttgaacatcccaggggaattgtccttcatcctcaaagagggcatgtctactgggcagattggggtgttcacgcatacattggaaggattggcatggatggaaccaataagtctgtgatcatctctaccaagatagaatggcccaatgccatcaccattgactacaccaacgatctcttgtactgggcagatgctcacctgggttatatcgagttctctgatttggaaggtcaccaccgacacacggtgtacgatggatcactgcctcacccctttgctcttacgatttttgaagacactgttttttggacagattggaatacacggacggttgaaaagggaaacaaatatgatgggtcaggtcgagtggtgctggtgaacacaacgcacaaacccttcgacatccacgtgtaccatccataccggcagccgattatgagcaatccctgtggtaccaacaacggtggctgttctcatctgtgcctcatcaaagcgggggggagaggattcacctgcgcgtgtcccgatgacttccagaccgttcagcttcgagacagaacactctgcatgcccatgtgctccagcacgcagttcctgtgtggcaacaatgaaaagtgtatccccatatggtggaaatgtgatggccagaaagactgctctgatggttctgatgaaccagacctgtgcccacaccgcttctgccgtctggggcagttccagtgccgggatggcaactgcacgagcccccaggctctgtgcaatgctcgccaggattgtgctgatggctctgatgaagaccgtgttctctgtgagcatcaccggtgtgagtccaacgagtggcagtgcgccaacaagcgttgcatcccacagtcctggcagtgtgactcagtgaacgactgcctggataactcagatgaggacacttcgcactgcgccagcaggacctgcaggcccggccagttcaagtgtaacaatggtcgctgtatcccgcagagctggaagtgtgacgtagacaatgattgtggagactactccgatgagcccatcgacgagtgcacgaccgctgcttacaactgtgacaaccacacagaattcagctgcaagactaactaccgttgcatcccgcagtgggcggtgtgcaatggttttgatgactgcagggacaacagtgatgaacaaggctgtgaatcggtgccatgccatccttctggggatttccggtgtgcgaatcaccactgcatccctctccgctggaagtgtgacggcactgacgactgtggagataactcggatgaggaaaactgcgttcctcgggagtgctcagagagcgagtttcgatgtgctgatcagcaatgcatcccctctcgatgggtctgtgaccaagaaaatgactgtggagacaactcggatgaacgggactgtgagatgaagacctgccatcctgaacattttcagtgtacgagtggacactgtgtgcccaaggcgttggcatgcgatgggagggcagactgtctggatgcgtctgatgaatctgcttgtcctactcgctttcccaacggcacctactgcccagccgccatgttcgaatgtaaaaaccacgtgtgcatccagtcgttttggatatgtgatggggaaaatgactgtgtcgacggttccgatgaggagatccacctgtgcttcaacattccgtgtgaatcaccacagcgattccggtgtgacaacagccgctgtgtttatggccatcagctgtgcaatggtgtggatgactgcggagatggaagtgacgagaaagaagagcactgtagaaaaccaacccacaaaccgtgcacagacactgaatataagtgtagcaatgggaactgcatttcgcagcactacgtgtgtgataatgtgaatgactgcggagacctttctgatgaaactggttgcaatctaggagataacagaacgtgtgctgaaaacatatgtgaacagaactgtacccagctgagcagcggaggctttatctgctcctgcagacccgggttcaaacctagtacttcggacaaaaattcctgtcaagacatcaatgaatgtgaggagtttggcatctgcccccagagctgtcgaaacagcaaaggaagttatgaatgtttctgtgtcgatggcttcaagtctatgagtacccattatggagaacggtgtgcagctgatggaagccctcctctcttgctcctgcctgagaatgtccgaatccggaagtacaatacctcctctgagaagttctcagagtatctggaagaggaggagcatatccaaactattgactatgactgggatcccgagcacataggcctcagtgttgtctattacactgtgctggcacagggctctcaattcggtgctatcaaacgtgcctacattcccaactttgaatctggtagtaacaatcccatacgtgaagttgacctgggcttgaaatatttaatgcagccagatggattagccgtggactgggtcggaaggcatatttactggtcagatgctaagagccaacggattgaggtggctaccctcgatggaaggtaccggaagtggctgatcaccacccaactggatcagccagctgccattgctgtgaatcctaagctagggcttatgttctggactgaccagggaaaacagcccaaaatcgagtctgcctggatgaacggggaacatcgcagcgttctggtttctgagaaccttggctggccaaacggtctttccatagattacctgaatgatgaccgggtctactggagcgactccaaagaagatgtcattgaagccataaaatatgatgggactgacaggagacttatcataaatgaagcgatgaagcccttcagtctggacatcttcgaagacaagctatactgggtagctaaggaaaagggagaagtgtggagacaaaataaattcgggaaagagaacaaagagaaagtgctggtggtgaacccgtggctcactcaagttcgaatcttccatcaactgagatacaatcagtcagtgtccaacccttgcaagcaggtctgtagtcacctctgcctgctgagaccaggaggctacagctgtgcctgtccccaaggctccgacttcgtaactggcagcactgtccagtgtgatgcagccagtgaacttcccgtcaccatgcctcccccatgcaggtgcatgcacggaggaaattgctattttgatgagaatgaactccccaaatgcaagtgttccagtggctatagcggagaatactgtgaggttgggctctcgagaggcatccctccagggacgacaatggctgttctgttgaccttcgtgatagtcatcattgttggagctctggtgcttgttggactctttcactacaggaaaactggctccctcttacccactctgcccaagctgccaagcctaagcagccttgccaaaccctctgaaaatggaaatggggtgacgttcaggtcgggggctgatgtgaacatggacatcggtgtgtctcctttcggccctgagacaattattgacagatccatggcgatgaatgaacactttgtcatggaggtgggcaagcagcctgtgatatttgaaaacccaatgtatgcagccaaggacaacacttccaaagtggccctggcagttcaggggccatcaacaggcgcacaggtgactgtaccagaaaatgtggaaaaccagaattatggaaggcccatagatccttctgagatagttccagagccaaagccagcctcccctggagctgatgaaattcagggcaaaaaatggaacatcttcaaacgaaaacccaaacagacaacgaactttgagaacccaatctacgcagagatggacagtgaggtaaaggatgctgtggctgtggccccccctccgtctccttctctccctgccaaagcttcaaaaagaaatttgactccaggctacactgccacagaagacacctttaaagacactgcaaatctcgttaaagaagattccgacgtatagcctcgccagctctctagggaacatttagacactcacttttgcacatatattttttacagacaaatgaaaaagaagttaacattcaatactttataaaaaaaatatatttttctctgtttgcctataattgaaggtgtgtcgtgtgtcttttttactgatgccacttcatatttttacaattatcacgggcactgtgtatatcttggactgatgttgtctggaggtgatgctgtgaacattactggacttgtgtaaactttggaaggattatcacacctctgcccctgctaacacgaaggtgcccgttgagtgggtcgctgagctgaagaatacacgatctggtgaggaaaggaattggcctagggctttggatctgtctagagaggagataacactcatatttcctttgaaacaatacaggaattctttatgctcatttgagggcccatttttacacattggcacttaattaatagtcaacgttcaacatcacgtgtcaacctgattagtgagtgtgcagataggggccagtgttggcttcatgcgctgtagatggctcagacaacacagacggtacacagggtgactcagctggacccttctgcgctcctccgccttctgaggccagctatgttttgattgtgcttcgtccctagttgccaagtcaacatttgcacctgccgtgtcacgtcccatactgagtttctgtctcatggaacgagctcttgcttgacagaccttaaatcaacttaagcccttgcctgtcatctcaggtgtcccctaccttcgtgactggaattccgtagttgactgtatgtactaaagccagacccgtgtctccacagagcagggcgccgaacagacaccagtcgatcgaagcctcagctgggtgtctgactctgggtgcacaatgttattgtactgactatttatttcctcagttgacgacgaatagaaagggaaaacattcttcctgagcctttctcaggcctttgcctaaatccgtgcatttgtgtccgaacgtactgtacgtcccagctcttcttttgagtggttggtgtatcctctgtcacaggaagtatggcacgagcatgcgttttccacagcgagtagcattcctggttctctgtgttcaccttgcacatgtgttaatgaatgaatgggagggtgggagaatggatgaatgaaatatactactgattattttattctcgagtcctcgaaatattttgttgctcgtattttgagtacccattgtaattactttgattagaaattaaaaagctactggaaacgctgctgctggaaatttctaataaatgtgtattttatc

SEQ ID NO: 1206 - DNA, 2237 bp, Rattus norvegicus
gccagcttcctgaggtaccaaggaggaaggatggaggaaagaatgaacgtgctccacgactttgggatccagtcgactcgctacctccaagtgaattacgaagactcccaggactggtttgtcttggtgtctgtgatcgctgacctcaggaacgccttctatgtcctctttcccatctggttccacattcaagagactgtgggcatcaatctcctctgggtggcagtggttggagactggttcaacctcgtctttaagtggattctttttggacagcgcccgtattggtgggtcctggacactgactattacagcaacagctccgtgcctctgataaaacagttccccgtcacctgtgagactggaccagggagtccctcgggccatgccatgggcacagcaggtgtatactacgttatggttacttctactctcgctatctttcgtggaaagaaaaagtcaacgtatggattccggtgcttgaatgtcgtcttgtggttgggatactgggctgtgcagctgaacgtctgtctgtcccggatctaccttgcggctcactttccccatcaggtggtggctggagtcttgtcaggcattgctgtggctgaaactttcagccacatccggggcatctacaatgccagcctccagaggtactgtctcatcaccttcttcctgtttggtttcgcacttggattttacctgctgctaaaggggctaggggtggacctcctgtggactttggagaaggccaagagatggtgtgagcgccccgagtgggtccaccttgacactacaccctttgccagcctcttcaaaaacctggggaccctcttggggttggggctggccctcaactccagcatgtaccgcaagagctgcaaaggagaactgcgcaagtcgctcccattccgtttggcctgcatcgtggcctccttgggcctgctgcatctctttgactcgctgaagcccccgtcccagattgagtcgatcttctacatcttgtctttctgcaagagtgcgaccgtcccctttgcatctgtcagtcttatcccctactgcctagcccggctcctgggacagacacacaagaagtctttgtaaagcgttaagtctctgacacaagtcagcggccgtgcaaaggactaggagcaacccaagccttgtgcaacccagtgtggggccagaggtgttcacagccaccctggtagccctgtctttctttgccatcgtaaccaaaaaggtgaatttttaaaagctaacagggctgtttgaggaaagcgtgaatgctggaagatgtttccctgatgaatcacttccggtctcctgtccgacacagaagagaaagcccagactagagatcctgacagaatgctctcactgtgcagaatcctccaggccgagggtaaaagaaaagagcgttgtgcatttgctaggaagagaaggaaggatcgggaggagggggagtgtttggtggattgagcaaaccatatgcaagccatgtctacccggcttcagttatgcctgggtctttagatatgtaggacactctcaataatgatagaccagcccgtgtaatgagtagccagttagaggcgatcattctgctcccagatttttctctactgtacatgaaagtcacaccgtgtgcttgtattcctgaatggtaatggtgactgtcactcaggaaccaccaccttctctgtgacaccacagctttgcctcctcggcccaggtctgcgtgccataggactcatcactgcttccctgaccacgctgctggaccctgcattgctgaaccccatgctgctggaccctgtggtgtacggtgggcaattgtttgctggtgcttttgtagggttaagttaaactctgagatcttgggcaaaacggcaaggggagagtcaggattcctctctccaaaggtcactccgaagttacttttgattcctggagcagaaatgactccttcctctagcccaagccagccaagaactcattcttagaggcaaagcagcccaagcccgactgtgcctgtcctccagcctgggctggttttgcagagtgtgtcttcaagaagaaaaaatggtaaagctatttattcaaaatgcttgttttttgctatgaatgatgcctgtgtttccacccacgccaagcacttgttcctattgtcttgataagaaactacatgtgtgcagtattttattaaaacgacattttatttaaaaaaaaaaaaa

SEQ ID NO: 1207 - DNA, 3974 bp, Rattus norvegicus
tcgactacccatattccccaccagccaaccggttcctcaccaagatgtggcacccaaacatctatgaggtaagacactagaggcctgcttcaggcacactccaccacacacttctctgcctcccttgcacatgctccacccctcctctaaccctggtcactcttgcagacaggggacgtatgcatctccatccaccatcccccagttgatgacccacagagtgggagctaccctcagagcggtggaaccccacgcagaatgtcaggtgagaattgccatggaactgcaccgtgggcacccgcaaacaccctgtaccctaagatccacccttccctgctccagtcaggggttcccagagtctggggagctgagcttgcacctacggccctacaggaccatcctcctgagtgtgatctccctgctgaatgagcccaacaccttctcgcctgccaacgtggacgcctcggtgatgtacagaaaatggaaggagagcaaggggaaggaccgcgagtacacggacatcatccggtgagtgcttcctactgtgaagagtgatctggggtgtgggtggggtggggacttgttgtatgtttccattttttgcatcccgggctggatgtgtggaggactctggggcccccagagcacggagttgaccacccagggtggccaagatcccctctgccttgttgttgacttaactccatgagcaactgggctctctgggccacaccctcactgtctgacagagagcatcaatcacttgcatttcgtgcttctgaaacttagagcttttttttttttttttgcaaagtgggaagggggctgagcccactgtgagtctgtcctcagttagggaccagggctgcgacctgttgctgtctatgagtggcagtgtccacacctatcatcgcttcttagcaggagctcctggcctgtctggggccaggcagtctcccctacacccctcacgttgggtatgaagttgcacttgaggggttcagtctttgtcgcttagcttctgtgttttctgagacaggctttcatataactccgtatctccttgtggtccctctgatgtcaggatgacaacacacattcctcggaagtgaccccagtgcttgtctacacagtgacccaaacacagggcctgtcctgtccccaagcctgccctctcagagttggtacaggccgcagctcggtaggcagtgctggtctagcatgtgcacacacacagggttagtctctgtcttaggcaaggtggatgtagccagcatggtccttcatggaggtataagttactcaggaaggtctgagcgctgcactacggaggtgtccccttcaccatggtcaggtcagcaacggtcccggtcactggaagtccctgcagactgtcccctttgttttctgttcagactggctgaacagaactttgttcctcctgctcttcctcagctgagaggaaggctggctgccctagctgttctatatagttctggctgtcctggaagaggagaccctgggtctggccctgtcactgcactctccaccctcctggcagcctttaatccacttctggctgcttcctccctggatccctggcccagagcaggagcccaggctatttttaccattctgactccaggagccacttgctctgaccaggaggcctgtaccactcctggaactcaacctgagccagtatctagtcatgtccctgcctgagcacaaggacaggatagctaggagcctgtgagaaggaccttgagatggatctaggctattgggtgtgctgctgtcccacgtgcccctccaccatagccttgtccccattcccctattccttctgggcagctgaaaacagtgtctgctctgcttgactgcactgggacctgtgccccaagactctggcctgacggtggcctggcctctcaggcacctagttaattgctgcctgccctgtgcaaggaagcccttacatgttgcttcacccatggcctgtgggacctggaacctcagttgttccggaactgcccttcatcatggtgccctcaggtcaggctgcaatttgttgttggtgtgaggaggtgcatgttacctagcccacaactagggtagtgccccccacagtctgggattacagctgtttctgtggtgctgggagctggacatgggtccttatgcttacagaaggagcactctggctgcccctgttgtcggttatagccgaggtcagcctgaatctcatagtagttctcctgcctccgcctccaaggactgggtgacagaccgtctcccacagctggctgtggttacatttctgctggagttggtcactgagccactccttgtcgcctggccctctcctcccacctgctccctgcccccattcatctcatcgtcctgggccgtggcctcacccgccctgtctccccaggaagcaggtcctggggaccaaggtggacgcagagcgcgatggcgtgaagtgcccaccacgctggccgagtactgcgtgaagaccaagcgccggcgcccgacgagggctcagacctcttctacgacgactactatgaggacggtgaagtggaggaggccgacagctgctttggggatgaagaggatgactctggcaccgaggagtcctgacccacgtccctgaaataaacttacaaattttacctcagcaggacccgtgtgggcctcaggcgacagactacctcaccgaggttcaatgtgggctcccatcccatgatccttaggtcctcttaccctgtattccccatgggttttcctcggctttggagaagagctgtggtgcagggcagacaccccactcagccttcagaggatgacaagcctgggaggctgggaaccgactgcccaggggagccagagactccagcccaaagagggccagccccacagtctcctctctgcttttggtgtgtgtgaaatccaaataaaatagctttctgagaagctgagagaagcagccaggacgccggtggcactgggtactgagggctacctgggtacccaggcagggctgtgggatgggcaggaagaggtagcgatggtggcctgtttgttggggctcagtagcatacaggagccccaggcccagaagaaacttgctgcctgcaaatcccacccgcctgcatcgggcactgtggttgcgtccaccccaagcctgtgttcaggaggcctgggtcctgaggcctacaggggattggtattcccaacagtccttgtgttctgggcacttcctcagccctggaaactagtgctgcctgaggagtccctctgatacctgagctgcagcctggtgactccacagcaggggcaggctgagtgaattctctgaccacaccatgctgtgcagggcacctgcagtgaccccgtgctgagatagcagatctgctctgccacctgcatgtttacgggtgctgtggaaagaaagtgtcacttcctcttatgcgggcctgttaatgtccaaagttccagtcaacccatgccagtcagaactgatcagagaaggacacatcggaaaaaggtgttcaggcgatcctctgcccatacaatttgctgccagcctgatctacagttgcaaaaccagcgggaaggctcagtgggcaaaggcctgcaccaagcctagcagaggacccacttggctccaggtggtccctgtgggggttgaggtcagttgagacaaatcccccccccccccccggagttcaccccagtgctaaaaggagcagtgtgccaggagagggagcatcgcttggctgtagttgctgcccccagacacagggcaactttgacagcagagttgctttctaaaaccacacagcagggtgtgaaggaggaggagctgacacgtgggtaaggtgggtggtgcttggaaggccacttgtctccaccggaagagaaagtgtggggccccttcccccagggaccaccagtcctgtgccagg

SEQ ID NO: 1208 - DNA, 1882 bp, Rattus norvegicus
tggagtttgagcttggcgagcagctggacaacgagcgagttgggatggccaccagctggggaagcatcttgcaggatgagaagcagctggaagagttggcacagcaggccatagaccgggccctggctgagggggtgttgctgaggtccgcaaagaaccccagctcctctgacgtggtgacgtatgccccattcacgctcttcccctcaccagtgcccagcactctgctggagcaggcctatgctgtgcagatggacttcaacatcctggtagatgctgtcagccagaactccgccttcctggagcaaacactgtctagcaccatcaaaaaggatgagtatactgcccgtctctttgatatctacaagcaagtcctgaaagagggcatagcccagactgtgttcctgggcctcaatcgttcagattacatgttccagtgcagcgcagacggctccaaagccctgaaacagattgagatcaacactatctctgccagctttgggggcctggcctcccggactccggctgtgcaccgacatgttctcaatgtcctgaataagaccaacgaagcttccaagatcctgtccaacaaccccagcaagggactggccctggggatcgccaaagcctgggagctctatggctcagccaatgccgtggtgctactgattgctcaggagaaggaaaggaacatatttgaccagcgtgccatagagaacgagctgctagacaggaagatccatgtaatccgccgaagatttgaagatgtctctgaaaggggttctctagaccaaaaccgaaggctgtttatggaggaccaggaagttgctgtggtttacttccgagatggctacatgcccagtcagtataacgcacagaactgggaagctcgcctgctgctagagagatcatgtgctgccaagtgtcccgacattgccacacagctggctggcactaagaaggtgcagcaggaactgagcagggtgggcctgctggaagcgctgctcccgggccagcccgaggctgtggcccgcctccgtgccacctttgctggcctctattcactggacatgggtgaagaaggggaccaggctgtcgctgaggcccttgctgcccctagccactttgtgctgaagccccaaagagagggcggaggtaataacttctatggggaggaaatggtacacgctctggagcagctgaaagacagcgaggagagagcctcctacatcctcatggagaagattgaacctgagccttttaggaattgcttactacggcctggcagccctgcccaagtggtccagtgcatctcggagctgggtatttttggagtctatgtcagacagggaacaacacttgtgatgaacaagcatgtggggcatctgcttcgaaccaaagccattgaacatgcagatggaggtgtggcagcaggagtggcagtcctggacaacccctaccctgtgtgaagacatgttctgggcttcactcaagagaccttctatcctctgtacttggcactcctctcctgaggggctacccctgtacctgtgttaggggagggagcttgtctctttcatagacctccaggggctttagggaagggaaaatcccgggtcccttctctcagccttccatccaaggaccagaaaagctatgattccattggaagagttctggagctccccagatttggagtgggaatggaagctcctttgaggcaaaggcccacaaaccccacacatcttcattgccctctcgccagcctttccagcaggttctagtgccttgacctggggtaggaccaagtgacaggaggaagagggtagatgggcatagacttccccagctctgccctaaataaaacaatgctgattcaatg

SEQ ID NO: 1209 - DNA, 2991 bp, Rattus norvegicus
tgcttcccacccgacccccaacccccatccccagttggagccgccgcccgagaggccgggccgtcgtcttgggaggagtccccgccgccgtcacctccgccatggagctcataaccatcctcgagaagaccgtgtctccggatcggctggagctggaagcggcgcagaagttccttgagcgtgcggctgtggagaatctgcccacgttcctggtggaactgtccagagtgctggcaaatcccggaaacagtcaggttgccagagttgcagctggtctacaaattagactcttgacatcgaaggatccagatatcaaggcacagtaccagcagaggtggcttgctattgatgctaatgctcggcgggaagtcaagaactatgttttgcagactttgggcacagagacttaccggcctagttcagcctcacagtgtgtggctggtatcgcttgtgcagagatcccagtaagccagtggccggaactaattcctcagctggtagccaatgtcaccaaccccaacagcacggagcacatgaaagagtccacactggaagccatcggttacatttgccaagatatagacccggagcagctgcaggataaatccaatgagatcctgactgccataatccagggcatgcggaaggaagagcctagtaacaatgtgaagctggccgctaccaacgcgctcctgaactcactggagttcaccaaagcaaacttcgacaaagagtctgaacggcactttatcatgcaagtggtctgtgaagccacacagtgtccagatacaagggtaagagtggctgctttacagaatctagtgaagataatgtccttgtattaccagtacatggagacatacatgggccctgccctctttgcaatcacaattgaagcaatgaaaagtgacattgatgaggtagctctccaagggatagagttctggtccaatgtctgtgatgaggaaatggatttggccattgaggcttcagaggcagcagaacaaggacggcccccggagcacaccagcaaattttacgccaagggagcgctgcagtacctggtgcccatcctcacacagacactaactaaacaggatgaaaacgatgacgacgatgactggaacccttgcaaagcagctggggtgtgcctcatgctcctgtctacctgctgtgaagatgacattgtgccacatgtccttccctttattaaagagcacatcaagaaccctgactggcggtaccgggatgcagcagtgatggcttttggcagcatcttggaaggaccagagcctaaccagcttaaaccattagtcatacaggctatgcccaccctgatagaattaatgaaagaccccagtgtagttgttcgagatacaacagcatggactgtgggcaggatctgtgagctgctgcctgaagctgccatcaatgatgtctacttggcaccccttttacagtgtctgattgagggtctcagtgctgaacccagagtggcttcaaatgtgtgctgggctttttccagtctggctgaagctgcttacgaagctgcagatgtagctgatgatcaggaagaaccagccacctattgcttgtcttcttcctttgaacttatagttcagaagctgctggagaccaccgacagacctgatggacaccagaacaacctgagaagttctgcatatgaatctctaatggaaattgtaaaaaacagtgccaaggattgttaccctgcggtgcagaagaccaccctggtcattatggaacggttgcagcaggtgcttcagatggagtcccacatccagagcacgtcggacaggatccaattcaatgacctccagtctctactctgtgcaactcttcagaatgttctctggaaagtgcagcatcaagatgctttgcagatctctgatgtggtcatggcctccctgttaaggatgttccaaagcacagctgggtctggcggagtgcaagaagacgccctgatggcagtcagcacactggtggaagtgttgggtggtgaattcctcaagtacatggaggcctttaaaccattcctgggcattggattgaaaaattatgctgaatgccaggtgtgtttggcagctgttggcttagttggagacttgtgccgagccctgcagtctaacatcttacctttctgtgatgaggtgatgcagctgctcctagagaacttagggaatgagaatgtccacaggtctgtgaaaccacagattctgtctgtgtttggtgacattactcttgccattggtggagaatttaagaaatacttggaggttgtactgaatacactgcagcaggcctcccaagcccaagtggacaagtcagactttgacatggtggattatctgaatgagctaagagaaagctgcttggaagcttatacgggaatcgtccagggattgaagggagaccaggaaaacgtacaccctgatgtaatgctggtgcaacccagagtagaatttattttgtcttttattgatcacattgctggagatgaggatcatacggatggagtggtagcttgtgctgctggactgataggggacttgtgtacagcatttggaaaggatgtactgaaattagtagaagctaggccaatgatccatgaactattaactgaagggcggagatcgaagactaacaaagcaaagacccttgctacgtgggcaacaaaggaactgaggaaactgaagaaccaagcttgatctggtaccattgggatgatgacctgagacccccactggaaatctccaatcttttgaaagaacccggaagtgaggagtgtgcacggatgctgaatgtttgggaatgagaggatgagtgagtgaggcttgaaaacaccacactgaaaatcctgccacagccaacagcagcagcgctgttagtgagctaagtaagcactgactttgtagaaaacacaacatcagccatcttggaacagagaaacaatggatttacttacttact

SEQ ID NO: 1210 - DNA, 1592 bp, Rattus norvegicus
gtcgaagcagcccgacggatttagccaggtccgggatctcagatgggggcaaaggcacctcaggcgctgctcctgctggtggcggtcgccctggccccgacccagacccgcgcaggctcacactcgctgcggtatttcgaaaccgccgtgtcccggcccggcctcggggagccacggttcatctctgtaggctacgtggacgacacggagttcgtgcgctacgacagtaacgcggagaatccgagatacgagccgcgggcgcggtggattgagtgggagaagccggactattgggagacgcagacacggagagccaagggaaacgagcagatttaccgagggagcctgacgaccctgctccactactacaaccagagcgaggacggctctcacaccatccagtggatgtatggctgtgacgtggggtcggacgggagcctcctccgcgggtattggcagcacgcctatgatggccgcgattacctcgccctgaatgaagacctgaaaacgtgggaggcctcggacagagcggcgcagaaaacccggaacaagtgggagcggaaaggtgttgcagagagaagcagggcctacctgaagggcacatgtgtggagtcgctccgcagatacctggagctcagaaaggagacgctgctgcgctcagatcccccaaaggtgcgtgtgacccttcaccccagacctgaaggtgatgtcaccctgaggtgctgggccctgggcttctaccctgctgacatcaccctgacctggcagttgaatggggaggacctgacccaggacatggaacttgtggagaccaggcctgcaggggatggaaccttccagaagtgggcatctgtggtggtgcctcttgggaaggagcagagttacacatgccttgtggagcatgaggggctgcctgagccgcttacccagagatgggagcctcctccatcaactgattccaacatgggaatcattgctgttctggctgtcgttggagctgtggctgtcattgtacttgtggccctcattggagttgttgtgaggaggaggaggaaaaacataggtggaatatgaggagattacgcccctgctctaggcagggacagctgccagagctctgatgtctctcccagattgtaaagcatgaagacagctgcctggagtggactgagtgacagatgatgtgttcaggtctctcttgtgacatccagagccctcagttctctttagacaccagtgtctgatgttccctgtgattctatggcttcagtgtgaagaactgtggagcccagcctgccctgcacttcaggaccctgtccctgcactgccttccttcccttcctaggccaaccttagtggtccagcctgggggtggggggtggggacatctacatcctgtccctccttgctgccctgagtgtcagcccctcacttccacactgagaataagaatctgagtgtgaacttgattgttcacatccttgactcaagtgtggatggctttttcaattactggatggaatacttagaggtttttcgttttggggttttgttttgaaaaaaaataaatggcagatggagaagcttggaaa

SEQ ID NO: 1211 - DNA, 583 bp, Rattus norvegicus
tttagccttaggagaaccagcagatcaaagcatggtctcctgtgatgggagagatggtgaagggacaaagcaagaagaaggggccaacctgaagaaaaacatgccatctgcacttgctttcgtcctacttgttctcaacatcagcctcctgaagggacagtcaccaccagggaaacctgagatccacaaatgtcgctctcctgacaaggaaacattcacctgctggtggaatcctgggacagatggaggacttcctaccaattattcactgacttacagcaaagaaggagagaaaaccacctacgaatgtccagactacaaaaccagtggccccaactcctgcttctttagcaagcagtacacttccatctggaaaatatatatcatcacagtaaatgccacgaaccaaatgggaagcagttcctcggatccactttatgtggatgtgacttacatcgttgagccagagcctcctcggaacctgacattagattatagatgggaagtatcttgtcaccaagaagccttacctaagtcagccaagctgaattgaaacttgttcaaatcaaggactggatgtttt

SEQ ID NO: 1212 - DNA, 413 bp, Rattus norvegicus
gctgaggagcctgaccggcccggcccggcggcttatggtgccgcgggctcaggtccactcgaagccgccgcgggagcagctcggggtcctggatatcaccattgggctcacttcctgcttcgtgtgttgtcttctacctgcgggctgggtcctgtcacacctggaaagctacaagaagcgggagtgaagggagcgtcttccctcatcctttgactagaccactcttgccagcccaccttgatcatgtttcctgcattcctggctggcttaccctgggatcatgttattcaattccagtcacctcttctgcaatcatgacctctcgatgtctccatggtgacaactgggaccacatatattggttctgcttgatggggtccccctttgtaacaataaagtctatttaaaccttg

SEQ ID NO: 1213 - DNA, 2401 bp, Rattus norvegicus
caacatgggggactctcacgaagacaccagtgccaccatgcctgaggccgtggctgaagaagtgtctctattcagcacgacggacatggttctgttttctctcatcgtgggggtcctgacctactggttcatctttagaaagaagaaagaagagataccggagttcagcaagatccaaacaacggccccacccgtcaaagagagcagcttcgtggaaaagatgaagaaaacgggaaggaacattatcgtattctatggctcccagacgggaaccgctgaggagtttgccaaccggctgtccaaggatgcccaccgctacgggatgcggggcatgtccgcagaccctgaagagtatgacttggccgacctgagcagcctgcctgagatcgacaagtccctggtagtcttctgcatggccacatacggagagggcgaccccacggacaatgcgcaggacttctatgactggctgcaggagactgacgtggacctcactggggtcaagtttgctgtatttggtcttgggaacaagacctatgagcacttcaatgccatgggcaagtatgtggaccagaggctggagcagcttggcgcccagcgcatctttgagttgggccttggtgatgatgacgggaacttggaagaggatttcatcacgtggagggagcagttctggccagctgtgtgcgagttctttggggtagaagccactggggaggagtcgagcattcgccagtatgagctcgtggtccacgaagacatggacgtagccaaggtgtacacgggtgagatgggccgtctgaagagctacgagaaccagaaaccccccttcgatgctaagaatccattcctggctgctgtcaccgccaaccggaagctgaaccaaggcactgagcggcatctaatgcacctggagttggacatctcagactccaagatcaggtatgaatctggagatcacgtggctgtgtacccagccaatgactcagccctggtcaaccagattggggagatcctgggagctgacctggatgtcatcatgtctctaaacaatctcgatgaggagtcaaacaagaagcatccgttcccctgccccaccacctaccgcacggccctcacctactacctggacatcactaacccgccacgcaccaatgtgctctacgaactggcacagtacgcctcagagccctcggagcaggagcacctgcacaagatggcgtcatcctcaggcgagggcaaggagctgtacctgagctgggtggtggaagcccggaggcacatcctagccatcctccaagactacccatcactgcggccacccatcgaccacctgtgtgagctgctgccacgcctgcaggcccgatactactccattgcctcatcctccaaggtccaccccaactccgtgcacatctgtgccgtggccgtggagtacgaagcgaagtctggccgagtgaacaagggggtggccactagctggcttcgggccaaggaaccagcaggcgagaatggcggccgcgccctggtacccatgttcgtgcgcaaatctcagttccgcttgcctttcaagtccaccacacctgtcatcatggtgggccccggcactgggattgcccctttcatgggcttcatccaggaacgagcttggcttcgagagcaaggcaaggaggtgggagagacgctgctatactatggctgccggcgctcggatgaggactatctgtaccgtgaagagctagcccgcttccacaaggacggtgccctcacgcagcttaatgtggccttttcccgggagcaggcccacaaggtctatgtccagcaccttctgaagagagacagggaacacctgtggaagctgatccacgagggcggtgcccacatctatgtgtgcggggatgctcgaaatatggccaaagatgtgcaaaacacattctatgacattgtggctgagttcgggcccatggagcacacccaggctgtggactatgttaagaagctgatgaccaagggccgctactcactagatgtgtggagctaggagctaccaccctcccacccctcgctccctgtaatcacctaacttctgccgacctccacctctggtggttcctgcctggcctggacacagggaggcccagggactgactcctcctggcctgagtggtgccctcctgggcccctaggcagagcccggtccattgtatcaggcagcccagccccagggcacatggcaagagggactggacccacctttgggtgatgggtgccttaggtcctctgcagctgtacagaaggggctcttctctccacagagctggggtgcagcccccacacgtgattttgaatgagtgtaaataattttaaataacctggcccttggaataaagttgttttcagt

SEQ ID NO: 1214 - DNA, 2495 bp, Rattus norvegicus
attgcctaccccgggtggagaccgtgctcgtccggccctcttgcctcacgttctgcagctctgcagctccgcaatcctacaccatggcggacagccgggacccagccagcgaccagatgaagcagtggaaggagcagcgggcccctcagaaacccgatgtcctgaccaccggaggcgggaacccaataggagataaacttaatatcatgactgcggggccccgagggcccctcctcgttcaagatgtggttttcaccgacgagatggcacactttgacagagagcggattcctgagagagtggtacatgcaaagggagcaggtgcttttggatactttgaggtcacccacgatattaccagatactccaaggcaaaggtgtttgagcatattgggaagaggactcctattgccgtccgattctccacagtcgctggagagtcaggctcagctgacacagttcgtgaccctcgtgggtttgcagtgaaattctacactgaagatggtaactgggacctcgtgggaaacaacacccctattttcttcatcagggatgccatgttgtttccatcctttatccatagccagaagagaaacccacaaactcacctgaaggaccctgacatggtctgggacttctggagtctttgtccagagtctctccatcaggttactttcttgttcagcgaccgagggattccagatggacatcggcacatgaatggctatggctcacacaccttcaagctggttaatgcgaatggagaggcagtgtactgcaagttccattacaagactgaccagggcatcaaaaacttgcctgttgaagaggcaggaagacttgcacaggaagacccggattatggcctccgagatcttttcaatgccatcgccagtggcaattacccatcctggactttttacatccaggtcatgactttcaaggaggcagaaaccttcccatttaatccatttgacctgaccaaggtttggcctcacaaggactaccctcttataccagttggcaaactggtcttaaacagaaatcctgctaattattttgctgaagttgaacagatggcttttgacccaagcaacatgccccctggcattgagcccagcccggacaagatgctccagggccgcctttttgcttacccagacactcaccgccaccgcctgggaccaaactatctgcagatacctgtgaactgtccctaccgtgctcgcgtggccaactaccagcgcgatggccccatgtgcatgcatgacaaccagggtggtgctcccaactactaccccaacagcttcagcgcaccagagcagcagggctcggccctggagcaccatagccagtgctctgcagatgtgaagcgcttcaacagtgctaatgaagacaacgtcactcaggtgcggacattctatacgaaggtgttgaatgaggaggagaggaaacgcctgtgtgagaacattgccaaccacctgaaagatgctcagcttttcattcagaggaaagcggtcaagaatttcactgacgtccaccctgactacggggcccgagtccaggctcttctggaccagtacaactcccagaagcctaagaatgcaattcacacctacgtacaggccggctctcacatagctgccaagggaaaagctaacctgtaaagcacgggtgctcagcctcctcagcctgcactgaggagatccctcatgaagcagggcacaagcctcaccagtaatcatcgctggatggagtctcccctgctgaagcgcagactcacgctgacgtctttaaaacgataatccaagcttctagagtgaatgatagccatgcttttgatgacatttcccgagggggaaattaaagattagggcttagcaatcacttaacagaaacatggatctgcttaggacttctgtttggattattcatttaaaatgattacaagaaaggttttctagccagaaacatgatttgattagatatgatatatgataaaatcttggtgattttactatagtcttatgttacctcacagcctggtatatatacaacacacacacacacacacacacacacacaccaaaacacacatacactatacacacacacacacacacacactaaaacacacatacacaacacacacatacactacacacacagaacacacaacacaaacatacacacataggcacacacacacacacacacacacacacacacacacacacacacacacatgaatgaagggattataaagatggcccacccagaatttttttttatttttctaaggtccttataagaaaaaccatacttggatcatgtcttccaaaaataactttagcactgttgaaacttaatgtttattcctgtgtagttgattggattccttttccccttgaaattatgtttatgctgatacacagtgatttcacatagggtgatttgtatttgcttacatttttacaataaaatgatcttcatgg

SEQ ID NO: 1215 - DNA, 8351 bp, Rattus norvegicus
gaattccatcagaatttgcctttctggtggcttctctttccctgcccttgtggtgtttttccttcagtgagtgacaaatttcacaaccctggctgggactcccgaggtgctaagattacaggcctgggtcacaccacccaaacctgactttctttttcattgttgcttgtatttttctgtttgtaaccaaagctggacgactggaactcactgtgtagactaggctggccttgaactcatagaactctacttgcctctgcctcctgagtgctctgattaacggcactgaccaatacatccaacctacctactttcattttctaaatctaagtcctaacaggaagtgggaactgggcaggaataacagtacggtgggttaactccatgagtttaccggactttgcgagcctcgactgccaacgacatcctggcttgaggctggaagtcacagcccaacaggggcaaagattgctctgtgaccagtctggaaagggagcactggagcacagaaatcaatccggttcaagttcatacccagggcaaccacggaaagtgccaggaaaggaaagaacaggatgttttccacacattccatgggcagccatggggatccaggagaaagtgatgcttggctgagccaagaagcagtgccccagtttacagtaagggctgagaggacagcctgtcctgagcttccggtaacacatttcctgccttctcaaatgacagacattccatctacgactttgagtctgatttcagcagtcttatgcaagaggggaaacaccatatgcctccagggaaagaaaatttggctgccgtctccaccctttccctcagcatccaccgtgggtgggggtggggagggttagtggggctttccatccctgtctttcagaacactacgatctggccctttctgcttggccaacacctgcgcagagtcctagttcatatcctcccagaatggcctgctctccacctccagcagagacccccatcattttttcctgttcactctctgccccccaccccccaccaagaataagtatccttagcacaaggcttgtgtctttatggtctctagtctctgacaactggctggagtctcagtggattcgaaccctccattcatcttgggctaatgactatgtgattgcgcctccgtttccacttttctactgtgaaaataatgaacaccccaagctatgttgtaaggaaaaatgagagccctaacagtgcccccagcacgtgacacgcagggggtacgtgacacgcagggggtacgtaaccaaggccggtaaagtctgggctagggctggtttttgttacctgttcacactgtcagctaggttttcctgtatgcggggtctccaagccccgctttcacctaagttagcactcaagacgtgctgtggggactgtgtccccgtggacgctgcagggggttcgatgtcccgcaactcctctgcacccggccacttgggcccagggcacgtgagcaggtttcctggaaccggtccccaccggatcgcagaccctttgcgctcagccctttgctctcagtccctgcgccaggagaaagggggtgtgactcagcgcgggggcgtgtgcaggctctgtacccacgtgcaaaaggagggatgcttgcagacttcgggtcgtgcgcaggctcccgggcgtgtgcgggccatttcccttgagccagaagaagggcgtgtgcaggcagtggggaggagggcaggtggcgccccgccacccgggcggagcttttgcgcgcgacccaatactctgggctataaaggtcgcgctccgcgtgcttctctccatcacgctcctagaactctacagcgatctctcgttgatctccaactgccgcctccattcgccatggaccccaactgctcctgtgccacaggtaaggggggctgctgacgggcctctgtaaccggagcttctgggagagcaggacggacttttgggcccctactctggtaactacttttagggtactactggctgctgccttccgaacgaattctggaacactcccgccccttttaaactagtccttgagataatggctcgcccaagctggctggcttgcacccgagttctttggagaactgtgttcagttatgcccgggtccgctcaccgcgctccctgccttcttcctctagatggatcctgctcctgcgctggctcctgcaaatgcaaacaatgcaaatgcacctcctgcaagaaaagtgagttggatttattttctctaccctttcccttcgcgcccctgcggtccctagcccgccgcaccttcccagagcgtccaggctgcctctaactcggtttctcgctcacgctcaacttttttcccccaggctgctgttcctgctgccccgtgggctgtgcgaagtgctcccagggctgcatctgcaaagaggcttcggacaagtgcagctgctgcgcctgaagtgggggcgtcctcacaatggtgtaaataaaacaacgtaaggaacctagcctttttttgtacaaccctgaccggttctccacacttttttctataaagcatgtaactgacaataaaataaaaaaacttgacttgattaacccagctttgtctgtgttcattggaaataaggggctggcagaggcgttgaaatgggattggtgcaccttgatttgggataagtggattgatgacccctctggactttgatagtctcgaacatggtgggcagaaacatgtactggtcacaaatgtgggcatgtgtatattggggattaaacccaaagcttcctgcttataaaccagggtgctctaatgagccacactcctacccctagatgcataatgattctggtttaattttggattattaggcttaaagcagtatgaagtacctgttcataagctttggtaaataaaataaaagttggagtgagtctcatacgactcctctttgtagtcccaatatttgggagcctgaggcagaaggatcggtgcaactccgaagccaacttggtctcaaattctgttaacctttgattttgagaccatcttactgtgtaacctaaaatggtccttgaacttgcagtcctgcctcagacttctaggtactgggattacaggctcagcttaaaatcagggctggagagatggctcagcggttaagagcacccgactgctcttccagaggtcatgagttcaattcccagcaaccacatggtgctcacaccatctgtaatgagatcttacgcgttctggcgtaatgcaagcagaaaagacatcagtaacgtgaacaaaaccatgaaaagtactgtaaacactataaatatccaagggtgtgccttgcagtttggagactaaatggcacatgtccaacctagagctcccatgaggaactgcccatctctggtatacagggacacggacaggattttttttttcctcttccagagagccctgtgataggacttggctgtcagtctggaagttcttctcaaggtcaggcagaaatctacctacccctcactccataccaacccctggcaatttaagcaaagtaactagaaatttggaaggaattgactagcatcttcccaggagctaggcatccaggttgagtctgcaatttggagggcggggtggagtttcctactctataggaaggaggtgaatacatgcaattaaaaccagccgttaatgccccctggctatttgttgaggtaatgcgatttggtcttcaatcaaagggaaagtttcttggctagaagtaaggaccaagcttgccgtaggctttctctgtgaagagtaaatttacaagacagcctctgtttcttgctgtcaggaagtcctagttcacagcccactttctctcttattggtcatgtagcctgggcaagtcactgaacccctcaaatgctgatatcctgccctcctagatgctgataaccacctgtccccaaagaacacacgggcaaccaagcacagatctgatttttaaggaatttgttttgtaagtgcagtttgggaatctggcctcatttgtctcttgtgtgcccttgctgacaccattcattcagccctggccttgatttaggtgacaccgaactcgggctgtaccctcagagatttccctctttgtctacaaacaaacaaacaaagcaaatatcctaattaagactcttgtgtgtcaagtagggcatctaggaatgagtgctgggaccactcttagtcccagaatgccttgaaaccaagtgaatgacaattatacatttagcttctcaattaaaatggaagacattgggccgggaattggctcacagtggagagcctaccaggcttttgtgaagctctgaggttcatccctagaaccattaaaaaaaggtccgtgggcctgggaatgtagctccctggtacagtgcttacctaacatgcacggacccctgggtttgctccacagcatggagtaagcagtctgatggcacacacctgtaattctaacacgcaggaggcagaggcaaggaggatcaaacgttcaaggaccacggcaagtttgaggtgtgggccacatgtaaagccgtctccaaaaagacatcacacacaaaacacaacagtattgtgatacacacgtatacctgtatcctagcaacctgggaaactgaagcaggagactgtcttgagttcaaggccagactgggctgttcggtgatcgacaggccattctgagttacagagtgaggcccttggaaaaggagaggaaggagaggaggagagactgggcctggcaacatgcatctatcatcttagctactcaggagactgaggcagggggaggatttccagctcaaagtctagctacagagcacgtctaaagccagcctggacagcttagtgagaccctgtttcaaaataaaaagaatctaaaagactggaggtaaagctccagtgtagaatgcttgcctggtaaccaggaagccttgggttcaatccttactgtaaaaaaaggaaaaaaaatcatattatgcaagaggtctaaaggcccaagaatctgttacagatctcagttttggtaatagacaataaaatataacaagttggtaaaaacaagcaagagtaccaactacaaacatacttcatgtggttcagcagaagcatctcagtatgcatccagaaaacagcagacagacagaattgggcatccttgggctagggcacacctcagcctgacttctacccgagaagccagcagtcttagccagtgcagaaccactggtgtctctgacttgggatctctgcttaggatgcgcccttgagtgcttagaatttgtctctagtcaggctgaatcctctctctttccaaacccagtccttagctatttaaaaccagtaaactcatgagatttggagtcatccaacgttatccaggcaaggattctgtttttttcttaatttttatatttaattgcttattaatttttgaaataggatctcatttgtgtggccctggctggccttgaactcaagaagaccatctgcctctgacttctaatagctgagattaaagaggtagcctcaggcaagaacttaactatagaccaagactcagttccacgtgaagttttttggatcttcccacacagagggtataactgtgtcatctccaagatgaggtatcccgaggaaggagaaatggcctgggtcattgtcaccaaaccagtgggtaataggttaatggaaagacacatgtgtctaaaccaccaaggaggaggaggaagagggcaaagaggggaaagaaggaggagggggaggagtgtcatagcccaggactaggtgccttctttgcctacacacggacctacgtacagaaggacagcatcagagaacttgggacccgtacaggaacattggtgtcaagctgtactgcttcacagcccgttttactactgactggttgtatggcccacccggcaggtcattgaatcctctgtccttgtgtgtaaatagaatttgcatctctatataggtattaggtgagagatcggtttgactcctggttctggcataatcatcatatcgcacagtggctggtggaggtcctataacagttaagcaaaacctgcccaaggtctcatagctctgagtacgcgtgaaccaatggcatagctgatctcttgccctagtctcaagggctgacagaatctaacgttactctaaagtcagaaacattgaaaatataaacagctgcccgtattggttttggtttttgttttttgttttttttttttgtttatttgttttgttttgttttatctaatgcagtccctggatatcacctaaaatgatccctctgcctcggtttttttttttttttttttttttttttttttttttggttctttttttcggagctggggaccgaacccagggccttgcgcttcctaggtaagcgctctaccactgagctaaatcctctgcctcggtttttaaaaccggcctggagtagagccgatggctaaaggtttgtgacccccagcccggaacgtgcctacatatgcccgctcatgagtggggaatatgttgcgatgagtgtccgttggctctgttgctgtgtccagaaggaaggggctcaaccaaagaccatgatgggacagagacagacaataaggacccggaaagttcgtaatcaaggctagtctttataaaactgtctccttcgcctctgctagcttcgattcagagagacgtgggcggagccggtcgctgcccaggaactccaggaaaggagaagctgaggatagcgcgctacgattgtgtttacagagacagttgggcttcctgaggtgtgttctcgtaatgcactggatcagtgatggcctgtaatatcccggaaagcactacagaaacatgatgttccacacgtcacacgggtcctcctacccgggccctcctactcgggcctgtggcaccaaagggggcggtcccgttgtgcacaccggcgcccgagggagctctgcactccgcccgaagagtgcgctcggctctgccaaggacgctgcgctcgtgactgagcgcgggctggagcaaccgccaactgagtgcaaaccctttgcgcccggacccgtccaacgactataaagagagcagactgtccgctaagcctcatcccgacttcagcagcctgactgccttcttgtcgcttacaccgttgctccagattcaccagatctcggaatggaccccaactgctcctgctccaccggtaagacgcccggtccttggtctttagaatacccagttgtaggggtttggcgggaataggcacctttagttgacaattcgtcctagttctttctagaacccgctcttggaatcgccttcacctgttcttggagtattattattgtccgaacggctccttgtcggggtttggggtaggatttagacgcgcaaataaatgtcccgatcacccacgtagtgggacatctgagttgagacccagttgttactaaccttattgtgaattgcctgatctacaagagaggtgagagaccgttgtgtcttgagatcaaagacccaagccttaccctaccctgtgaggagagaagaggggctaggctccctggagttctgaatagcactttgaattgagcagggcacatggtgttggccactgctgtaatcctgcctcttactgaccgctgtcttccttctcctccacaggcggctcctgcacctgctccagctcctgcggctgcaagaactgcaaatgcacctcctgcaagaagagtgagttgggaccctcgggtggtggtgggggaactcctacagagctggctctgagaaacgtctgaggccattcggtttggggcaagaagcaggtcttctgccagacctgtgcgaccggaggactaggaagcctactctgacatcttcctctatctttctttccaggctgctgctcctgctgccccgtgggctgctccaaatgtgcccagggctgtgtctgcaaaggtgcctcggacaagtgcacgtgctgtgcctgaagtgacgaacagtgctgctgccctcaggtgtaaataatttccggaccaactcagagtcttgccgtacacctccacccagtttactaaaccccgttttctaccgagcatgtgaataataaaagcctgtttattctaactctggttttcttggtgtcgtttagaaataagaaactggggcgacacgggttaacttgatagtctggggatctggttttggactcgcccgtgccttttaactcccgcctctggctcccaaagaggggtaataatgtctttgggtaaagccaagttatcccataagctt

SEQ ID NO: 1216 - DNA, 2073 bp, Rattus norvegicus
gtctctgtgtggtctcgtcatcagcacagctgggcctacacgcaagcaaccatgtctaagggacctgcggttggcattgatcttggcaccacctactcctgtgtgggtgtcttccagcatggaaaggtggaaataattgccaatgaccagggtaaccgcaccacgccgagctatgttgctttcaccgacacagaacgattaattggggatgcggccaagaatcaggttgcaatgaaccccaccaacacagtttttgatgccaaacgtctgatcggacgtaggttcgatgatgctgttgttcagtctgacatgaagcactggcccttcatggtggtgaacgatgcaggcaggcccaaggtccaagtcgaatacaaaggggagacaaaaagtttctatcctgaggaagtgtcttcaatggttctgacaaaaatgaaggaaattgcagaagcttaccttggaaagactgttaccaatgccgtggtcaccgtgccagcttacttcaatgactctcagcgacaggcaacaaaagatgctggaactattgctggcctcaacgtacttcgaattatcaatgagccaactgctgctgctattgcctatggcttagataagaaggtcggggctgaaaggaatgtgctcatttttgacttgggaggtggcacttttgatgtgtcaatcctcactatcgaggatggaatttttgaagtcaaatcaacagctggagacacccacttgggcggagaagactttgacaaccgaatggtcaaccatttcattgctgagtttaagcgaaagcacaagaaggacatcagtgagaacaagagagctgtcaggcgtctccgcactgcctgtgagcgggccaagcgcaccctctcctccagcacccaagccagtattgagattgattctctctatgagggaattgacttctacacctccattacccgtgctcgatttgaggagttgaatgctgacctgttccgtggcacactggaccctgtagagaaggcccttcgagatgccaaactagacaagtcacagatccatgatattgtcctggtgggtggttctaccagaatccccaagatccagaaacttctgcaagacttcttcaatggaaaagagctgaataagagcattaaccccgatgaagctgttgcctatggtgcagctgtccaggcagccattctatctggagacaagtctgagaatgttcaggatttgctgctcttggatgtcactcctctttcccttgggattgaaactgctggtggagtcatgactgtcctcatcaagcgcaataccaccattcccaccaagcagacccagactttcaccacctactctgacaaccagccaggtgtactcatccaggtgtatgaaggtgaaagggccatgaccaaggacaacaacctgcttgggaagtttgagctcacaggcatacctccagcaccccgtggggttcctcagattgaggttacttttgacattgatgccaatggcatcctcaatgtttctgctgtagataagagcacaggaaaggagaacaagatcaccatcaccaatgacaagggccgcttgagtaaggaggatattgagcgcatggtccaagaagctgagaagtacaaagctgaggatgagaagcagagagataaggtttcctctaagaactcgctggagtcttatgctttcaacatgaaagcaactgttgaggatgagaaacttcaaggcaagatcaatgatgaagacaaacagaagattcttgacaagtgcaacgaaatcatcagctggctggataagaaccagactgcggagaaggaagaatttgagcatcagcagaaagaactggagaaggtctgcaaccctatcatcaccaagctgtaccagagtgctggtggcatgcctggaggaatgcctggtggcttccctggtggaggagctcctccatctggtggtgcttcttcaggccccaccattgaagaggtcgattaagtcaaagtagagggtatagcattgttccacagggacccaaaacaagtaacatggaataataaaactatttaaattggcacc

SEQ ID NO: 1217 - DNA, 1696 bp, Rattus norvegicus
cgctgaacgctctcatcatcctaccgtcatgtctaagtcagagtcccccaaggaaccggaacagctgcggaagctcttcattggagggctgagcttcgaaacaaccgacgagagtctgaggagccattttgagcaatggggaacactcaccgactgtgtggtaatgagagatccaaacaccaaaagatccagaggctttgggtttgtcacatatgccactgtggaggaagtggatgctgccatgaatgcaagaccacacaaagtggatggaagagttgtggaacctaagagagctgtgtcaagagaagattctcagagaccaggtgcccacttaactgtgaagaagatctttgttggcggtattaaagaagacactgaagaacatcacctacgagattattttgagcagtatgggaaaattgaagtgattgaaattatgactgacagaggcagtggaaaaaagaggggatttgcgtttgtcacctttgatgaccatgactctgtggataagattgttattcagaaataccatactgtgaatggccacaactgtgaagtaagaaaggctctgtgcaaacaagagatggctagtgcttcatccagccagagaggtcgaagtggttccggaaactttggtggtggtcgtggaggtggtttcggtggcaatgacaattttggtcgaggagggaacttcagtggtcgtggtggctttggtggcagccgtggtggtggtggatatggtggcagtggggatggctataatggatttggcaatgatggaagcaattttggaggtggtggaagctacaatgattttggcaattacaacaaccagtcatcaaattttggaccgatgaaaggaggaaactttggaggcaggagctctggcccttatggtggtggaggccagtactttgctaaaccacgaaaccaaggtggctatggaggttccagcagcagcagtagctatggcagtggcaggaggttctaattacagccaggaaacaaagcttagcaggagagccagagaagtgacagggaagctacaggttacaacagatttgtgaactcagccaagcacagtggtggcagggcctagctgctacaaagaagacatgttttagacaatactcatgtgtgtgggcaaaaactccaggactgtatctgtgactaattgtataacaggttattttagtttctgttctgtggaaagtgtaaagcattccaacgaagggttttactgtagacctttttcacccatgctgttgattgctaaatgtaaaagtctgatcatgacgctgaataaatgtgtcttttttttttttttttaatgtgctgtgtaaagttagtctactctgaagccatcttggtaaacttccccaacagtgtgaagttagaattccttcagggtggtgccaaattccatttggaatttatttatggttgcttgggtggagaagccattgtcttcaaaaaccttggtgttgctaaactgccagttactgttgtaacttaatgagtttcaccatttaaagggtcatccaagcaagatcacaatttggttataaaatggttgttggacacctatgaagagaaaattgaataacggtctcagataaaataagagatgggaatgaagcttgtgtatcatccattatcatgtgtactcaataaacgatttaattctcttgaatgg

SEQ ID NO: 1218 - DNA, 1998 bp, Rattus norvegicus
agccctcccatcctgagtgccaacctttcccaaccccgctgctaagctagacacctcactcactgagagccagcatggcagctgttgtcctggagaatggagtcctgagcagaaaactctcagactttgggcaggaaacaagctatattgaagacaactccaatcaaaatggtgccatatctctgatattctcactcaaagaggaagttggtgccctagccaaggtcctgcgcttatttgaggagaacgatatcaacctgacacacattgaatccagaccttctcgtttaaacaaagatgagtatgagttcttcacttatctggataagcgtacgaaacctgttctgggcagcatcatcaagagcctgaggaatgacattggtgccactgtccacgagctttcccgagacaaggaaaagaacacagtgccctggttcccaaggaccattcaggagttggaccgattcgccaatcagattctcagctatggagccgaactggatgcggaccacccaggctttaaagatcctgtgtaccgggcgagacgaaagcagtttgctgacattgcctacaactaccgccatggccagcccatccctcgggtggaatacacagaggaagagaagcagacctggggaacggtgttcaggaccttgaaggccttgtataaaacacatgcctgctacgagcacaaccacattttcccacttctggaaaagtactgcggtttccgtgaagacaacattccacagctggaagatgtttctcaatttctgcagacttgtactggtttccgcctccgacctgttgctggcttactgtcatctcgagatttcttgggtggcctggccttccgagtcttccactgcacacagtacattaggcatggatcgaagcccatgtacacacctgaacctgacatctgccatgaactcttgggacatgtgcctttgttttcagatcgcagctttgcccagttttctcaggaaattgggcttgcatcactgggggcacctgatgagtacattgagaaactggccacaatttactggtttactgtggagtttgggctttgcaaggaaggagattctataaaggcatatggtgctgggctcttgtcatcctttggagaattacagtactgtttatcagacaagccaaagctcctccccctggagctagagaagacagcctgccaggagtattctgtcacagagttccagcccttgtactacgtggcggagagtttcagtgatgccaaggagaaagtgaggacttttgctgccacgatccctcggcccttctcggttcgctatgacccttacactcaaagggttgaggtcctggacaatactcagcagttgaagattttagctgactccattaatagtgaggtcggaatcctttgcaatgccctgcagaagataaagtcgtgagcagaaaatgacgtcatgggcagaacttaggaggtcaaccagaaatcggtcgatagaagtatagtaactgcctttgttcccctgaagaaaaaaagttttatttgaaacgtcagcttttattatttttgctaacacagtggagcatcaccaaataaatcaaagttctctgaaatgaaagtgtgttaaaaccctccaggggtagatctttcagaatcacatttgatttagataatctcatagcttcaatttggtttaaaatgtaattttctcagctctcatcaacattcatcaaatttggggcttgtgtcattggggcttcatccgttcatttttaacctctcaggtaagctctgaaggaacacatttggctgagtgtaaaatgtaagactgccatcagggatgaatcattccgttcagtacagattgtaatctacaaagggtagttttcaccttcgttcattatggctctgagaactgctttgttagcctgcttacataaatctcccctgatcggagaccctattaagatagttacaagcaataaagttttagagcattatat

SEQ ID NO: 1219 - DNA, 1620 bp, Rattus norvegicus
gcaaaatgaagagggttctggttctcctgctggccttagcctttgggcatgccctagagagaggccgagattatgagaaggataaagtttgccaggaactctccacgctggggaaagatgacttcagatctctatcactaatcctatacagcaggaagtttcccagtagcacctttgaacaggtcagtcagcttgtgaaggaagttgtctccttaactgaggaatgctgtgctgagggagcagatcccaactgctatgacaccaggacttcagagctgtctattaagtcctgtgaaagtgacgccccctttcccgttcaccccgggacttccgagtgttgcacgaaggaggggctagagcggaaactctgcatggctgccctcagtcaccagccacaggaatttcccgcctatgtggagccgacgaatgatgagatctgtgaggcgttcaggaaggatccaaagggatttgccgatcagtttctattcgaatattccagcaattacggacaagctcctctgccacctttagttggttacaccaagagttatctctctatggttggctcctgctgtacttctgcaaaaccaactgtgtgctttttgaaggagagactccagatgaaacagttactacttctcaccactatgtcaaacagagtctgctcacaatatgctgcatatggaaaggaaaaatcaaggatgagccatctcataaaactagcccaaaaagtaccaactgctaacctggaggatgttctgccactcgctgaagaccttactgaaatcctgtccagatgttgtaagtctacctcagaggactgcatggccagagagctgcctgaacacacattaaaaatctgtggaaacttatccaaaaagaattcaaagtttgaagagtgctgttacgaaacaacacccatgggcatttttatgtgtagctacttcatgccaactgctgaaccacttcaattgccagccatcaagctgccaaccagcaaagacctctgtggtcagagtgccacacaagccatggaccagtatacatttgaactaagcagaaggacccaggttccagaagtgttcctcagcaaagttctggatacgaccctgaaaacccttagggaatgctgcgacactcaggactctgtctcctgtttcagcactcagagtcccctgatgaagaggcaactaacttctttcattgaaaaggggcaagaaatgtgtgcagattattccgagaacacatttactgagtacaagaaaaaattggcggaacgactgaggacaaaaatgcccaatgcctccccggaagagctggcagacatggtggccaagcactcagactttgcctccaagtgctgctccataaactctcctccacgctactgtagctcacagattgatgcagaaatgagagacatcctgcagtcctgatgcagggtatatgcaatgccttggacctagaactggaccactctggaaaaattgccagataacaaaatcaagcaaataccacagagatggccttccaggaggaccaccaggataattccatttttcccatctacaatgttttttgatgaattataaaaataaattgaaatatggtgcaaactct

SEQ ID NO: 1220 - DNA, 1442 bp, Rattus norvegicus
gtcccccccaccccagctgaataggctgcgttctcttggaacgcgccgcagaacgaggttctgtgaccctagccgcgttccctccttagttcctttcgcctacccacccgcgtacccgacagacccaccccgtcctgtgccaggaaagcgctgccaccggcaccatgccccacccatacccagcactgaccccggagcagaagaaggagctggctgacatcgctcaccgaattgtagctccgggcaagggcatcctggctgcagacgagtccactggaagcattgccaagcgcctgcagtccattggcaccgagaacaccgaggagaacaggcgcttctaccgccaactgctgctgactgccgatgaccgtgtgaatccctgcattggaggggtgatccttttccacgagacactgtaccagaaggcagatgatggccgtcccttcccccaagttatcaagtccaagggtggtgttgtgggcattaaggtagataagggtgtagtgcccctggctggaaccaatggcgagaccactactcaagggctggacgggctgtctgagcgctgtgcccagtataagaaggatggagccgactttgccaagtggcgctgtgtgctaaagattggggagcatactccctcgtccctcgccatcatggaaaatgccaatgttctggcccgttacgctagcatctgccagcagaatggcattgtacccattgtggagcctgaaattctccctgatggggaccatgacttgaagcgctgccagtatgtaactgagaaggtactggcagctgtctacaaggctctgagtgaccaccatgtctatctggaaggcacactgctgaagcccaacatggtcacccctggccatgcttgcacccagaaattttccaatgaggaaattgccatggcaaccgtcacagcacttcgtcgaacagtgccccctgccgtccctggggtcactttcctgtctggagggcagagtgaggaagaggcatccatcaacctcaatgctatcaacaagtgtcccctgctgaagccatgggccttgactttctcctatggccgagccctgcaggcctctgctctaaaggcttggggtgggaagaaggagaacctgaaggcagcccaggaggagtacatcaagcgagccctggccaacagcctcgcttgtcaaggaaagtacactccaagtggccagtctggagccgcagccagtgaatctctcttcatctctaaccatgcctactaaccagagctgatctaaggctgctccatcgacactccaggcccctgcctacccacttgctattgaagaggggccttcaggctctttcccatcactcttgctgccctcgtgtgtgcagtgttgtctgtgaatgctaaatctgccatcccttccagcccactgccaataaacagctatttaaggggg

SEQ ID NO: 1221 - DNA, 3197 bp, Rattus norvegicus
gaattcaaggcccatactgaacatggtaaaagccatatacagcaaaccagttgctaacattaaactaaatggagagaaacttgaagcaatcccactaaaatcagggactagacaaggctgcccactctctccctacttattcaatatagttcttgaagttctagccagagcaatcagacaacaaaaggatgtcaaggggatacagatcgctaaagaagaagtcaaaatatcactatttgcagatgatatgatagtatatttaagtgatcccaaaagttccacgagagaactactaaagctgataaacaacttcagcaaagtggctgggtataaaattaactcaaataaatcagttgccttcctctatacaaaagagaaacaagccaagaaagaaattagggaaacgacacccttcataatagacccaaataatataaagtacctcggagtgactttaacaaagcaagtaaaagatctgtacaataagaacttcaagacactgaagaaggaaattgaagaagacctcagaagatggaaagatctcccatgctcatggattggcaggattaatatagtaaaaatggccattttaccaaaagcaatcttcagattcaatgcaatccccatcaaaataccaatccaattcttcaaagagttagacagaacaatttacaaattcatctggaataacaaaaaacccaggatagctaaaggtatcctcaacaatgaaaggacttcagggggaatcactatccctgaactcaagcagtattacagagcaatagtgataaaaactgcatggtattggtacagagacagacagatagaccaatggaatagaattgaagacccagaaatgaacccacacacatatggtcacttgatttttcacaaaggagccaaaaccatccaatggaaaaaagatagcattttcagcaaatggtgctggttcaactggaggtcaacatgtagaagaatgcagatcgatccatgcttatcaccctgtacaaagcttaagtccaagtggatcaaggacctccacatcaaaccagacacacccaaactaatagaagaaaaactagggacgcatctggaacacatgagcactggaaaaaatttcctgaacaaaacaccaatggcttacgctctaagatcaagaattgacaaatgggatctcataaaactgcaaagcttctgtaaggcaaaggacactgtggttaggacaaaacggcaaccaacagattgggaaaagatctttaccaatcctacaacagatagaggccttatatccaaaatatacaaagaactcaagaagttagaccgcagggaaacaaataaccctattaaaaaatggggctcagagctaaacaaagaattcacagctgaggaatgccgaatggcggagaaacacctaaagaaatgttcaacatctttagtcataagggaaatgcaaatcaaaacaaccctgagatttcacctcacaccagtgagaatggctaagatcaaaaactcaggggacaacagatgctggcgaggatgtggagaaagaggaacactcctccattgttggtgggattgcaaactggtacaaccattctggaaatcagtctggaggatcctcagaaaattggacattgaactgcctgaggatccagctatacctctcttgggcatatacccaaaagatgccccaacatataaaaaagacacgtgctccactatgttcattgcagccttatttataatagccagaagctggaaagaacccagatgcccttcaacagaggaatggatacagaaaatgtggtacatctacacaatggaatattactcagctatcaaaaacaacgactttatgaaattcgtaggcaaatggctggaactggaaaatatcatcctgagtgagctaacccaaacacagaaagacatacatggtatgtactcactgatatgtggctattagccaaatgcttgaattaccctaaatgcctagaacaaatgaaactcaagacagatgatcaaaatgtgaatggttcactccttctttaaaaggggaacaagaatacccttggcagggaagagagaggcaaagattaaaacagagactgaaggaacacccattcagagtctgccccacatgtggcccatgcatatacagccatccaattagacaagatggatgaagcaaagaagtgcaggctgacaggagccggatgtagatcgctcctgagagacacagccagaatatagcaaatacagaggcgaataccagcagcaaaccactgaactgagaataggacccccgttgaaggaatcagagaaagaactggaagagcttgaaggggctcgagaccccatatgtacaacaatgccaagcaaccatagcttccagggactaagccactacctaaagactatacatggactgaccctggactctgacctcataggtagcaatgaatatcctagtaagagcaccagtggaagcggaacgcctgggtcctgctaagactgaacccccagtgaactagactgttgcggggagggggacaatggggggagggtggggaggggaacaccgataagaaacaggggggggagggggatgtttgcccggaaactgggaaagggaataacactcgaaatcgtatataagaaatactcaagttaataaaaataaaataaaataaaataaaaaaggagcattcaactcataaataatttttgttctgaaaaatatttttaattgttatcagttatgagacagcttttcagaagattgtgtgtgtgtgtgtgtgtgtgtgtgtgtgtgtactacagcatgttttatatttagttatcaatccttgaagaatgatttagttttaaattaaatttaaatataatactagactctgttagatacgaaaggtaaatttctattttggttccctttactcccatgtctagtgtttctagatggaaaatattgtgatcctgctgtcttatagatttaacttaagaatgtttacattttattttcaactagattggcaattcaaagcctggtcttagaagttattttaaagtatgttcttagtgtaagtcaatttttaagctagttgtagttcatttaatttcctcacaagagttatttttgtgtgtggtatatttctcttttgttaggtgatttttgctgttatacttaccttgaattc

SEQ ID NO: 1222 - DNA, 2383 bp, Rattus norvegicus
ctctgtgagacacctgaccgaccgctgagcgactgactggtccacagcgccggcaagatgaagttcactgtggtggcggcggcgctgctgctgctgtgtgcggtgcgggcggaggaggaggacaagaaggaggatgtaggcacggtggttggcatcgacttggggaccacctattcctgcgtcggtgtattcaagaacggccgcgtggagatcatagccaacgatcagggcaaccgcatcacaccgtcgtatgtggccttcactcctgaaggggagcgtctgattggcgatgcggccaagaaccaactcacgtccaacccggagaacaccgtcttcgacgccaagcgcctcatcggacgcacttggaatgacccttccgtgcagcaggacatcaagttcttgccattcaaggtggttgaaaagaaaactaaaccatatattcaagttgatatcggaggtgggcaaaccaagacatttgccccagaagaaatttctgctatggttctcactaaaatgaaggaaactgccgaggcgtatttgggaaagaaggtcacccatgcagttgtgactgtaccagcttacttcaatgatgcacagcggcaagcaaccaaggatgctggcactattgctggactgaatgtcatgaggatcatcaatgagccaacagcagctgctattgcatatggcctggataagagagagggagagaagaacatcctcgtgtttgacctgggtggtggaaccttcgatgtgtctcttctcaccattgacaatggtgtctttgaagtggtggccactaatggagacactcatctgggtggggaagactttgatcagcgggtcatggagcacttcatcaagctgtacaaaaagaagactgggaaagatgtcagaaaggacaacagagctgtgcagaaactccggcgtgaggtagaaaaggccaagagagccctgtcttctcagcatcaagcgaggattgaaattgagtccttcttcgaaggagaagacttctcagagacccttactcgggccaaatttgaagagctgaacatggacctgttccgctctaccatgaaacctgtccagaaagtgttggaagactctgatctgaagaaatctgatattgatgagattgttctggttggcggatctactcgaattccaaagattcagcagttggtgaaagagttcttcaatggcaaggagccgtcccgtggcatcaacccagatgaggctgtagcatatggtgccgctgtccaggctggtgtcctctctggtgatcaagatacaggtgacctggttctgcttgatgtgtgtcctcttacacttggtattgaaactgtgggaggtgtcatgacaaaactgattccgaggaacactgtggtgcccaccaagaagtctcagatcttctccacagcttctgataatcagcccaccgtaacaatcaaggtctacgaaggtgaacgacccctgacaaaagacaatcaccttctgggtacatttgatctgactggaatccctcctgctccccgtggggtaccccagattgaagtcacctttgagatagatgtgaatggtattcttcgagtgacagctgaagacaaagggacaggaaacaaaaacaaaatcaccatcaccaatgaccaaaaccgcctgacccctgaagaaattgaaaggatggtcaatgacgccgagaagtttgctgaggaagacaaaaagctcaaagagcgcattgacacgaggaatgaattggaaagctatgcttactctcttaagaaccagatcggagataaagagaagctgggaggtaagctgtctcctgaagataaagagaccatggagaaagctgtagaggaaaagatcgaatggctggaaagccaccaggatgcagacattgaagactttaaagctaaaaagaaggaactagaagaaattgttcagccaattatcagcaaactctatggaagtggaggccctcccccaactggtgaagaggatacatcagaaaaagatgagttgtaggtgcactgatctgctagagctgtaatattgtaaatactggactcaggaactttcgttgggagaaaattgagagaacttaagtctcgaatgtaattggaatcttcacctcagagtggagttgaaaatgctatagcccaagtggctgtttactgcttttcattagcagttgctcacgtgtcttggggtcagggagaggaggaattggctattttaaaattggggaaaagctgggtcagggtgtgtgttcaccttggatatgttctatttaacggttgggtcatgcacatctggtgtaggaacttttttctaccataagtgacaccaataaatgtttgttatttacactggtctagtttttgtg

SEQ ID NO: 1223 - DNA, 1457 bp, Rattus norvegicus
gcaagcctcagcatccttggctttgcagtctcctgcggcaagcattctcgaggaagccagccaaggaccaactacaaccatgagactggcagtggtttgcctttgcctgttcggccttgcctcctgtctcccggtgaaagtggctgagtttggcagctcagaggagaaggcgcattacagcaaacactcagatgctgtagccacttggctgaagcctgacccatctcagaagcagaatcttctagccccacagaattctgtgtcctctgaagaaacggatgactttaagcaagaaactcttccaagcaactccaatgaaagccatgaccacatggacgatgatgacgacgacgatgacgacggagaccatgcagagagcgaggattctgtgaactcggatgaatctgacgaatctcaccattccgatgaatctgatgagtccttcactgccagcacacaagcagacgttttgactccaatcgcccccacagtcgatgtccctgacggccgaggtgatagcttggcttacggactgaggtcaaagtccaggagtttccctgtttctgatgaacagtatcccgatgccacagatgaggacctcacctcccgcatgaagagccaggagtccgatgaggctatcaaggtcatcccagttgcccagcgtctgagcgtgccctctgatcaggacagcaacgggaagaccagccatgagtcaagtcagctggatgaaccaagcgtggaaacacacagcctggagcagtccaaggagtataagcagagggccagccacgagagcactgagcagtcggatgcgatcgatagtgccgagaagccggatgcaatcgatagtgcagagcggtcggatgctatcgacagtcaggcgagttccaaagccagcctggaacatcagagccacgagtttcacagccatgaggacaagctagtcctagaccctaagagtaaggaagatgataggtatctgaaattccgcatttctcatgaattagagagttcatcttctgaggtcaattaaagaagaggcaaaaccacagttccttactttgctttaaataaaacaaaaagtaaattccaacaagcaggaatactaactgcttgtttctcagttcagtggatacatgtatgtggagaaagaaatagatagtgttttgggccctgagcttagttcgttgtttcatgcagacaccactgtaacctagaagtttcagcatttcgcttctgttctttctgtgcaagaaatgcaaatggccactgcattttaatgattgctattcttttatgaataaaatgtatgtagaggcaggcaaacttacaggaacagcaaaattaaaagagaaactataatagtctgtgtcactataatcttttggttttataattagtgtatattttgttgtgattatttttgttggtgtgaataaatcttgtatcttgaatgt

SEQ ID NO: 1224 - DNA, 2462 bp, Rattus norvegicus
gatggctgcaccatgagcgtctctgcactgagctccacccgcttcacgggcagcatctctggcttcctccaagtggcctccgtgcttggtctgcttctgctgctggtcaaagcagtccagttctacctgcaaaggcaatggctactcaaggctttccagcagttcccatcacctcccttccactggttctttgggcacaagcagtttcaaggtgacaaagaactacagcaaattatgacatgtgtggagaatttcccaagtgcctttcctcgatggttctggggaagcaaagcctacttaattgtctatgaccctgactacatgaaggtgattctcgggcgatcagatccaaaggccaatggcgtctacagattgctagctccttggatcggatatggtttgctcttgctgaatggacaaccgtggttccagcaccggcgaatgctaaccccagccttccactatgacattctgaaaccctatgtaaaaaacatggctgactccattcgactgatgctagacaaatgggaacagctggcaggtcaagactcctctatagaaatctttcaacatatctccttaatgaccctagacactgtcatgaagtgtgccttcagccacaatggcagtgttcaggtggatggaaattacaagagctatatccaggccattgggaacttgaatgacctctttcactcccgtgtgaggaacatctttcatcagaatgataccatctataatttttcttccaatggccacttgttcaaccgtgcttgtcaacttgcccatgatcacacagatggtgtgatcaagctaaggaaggatcagctgcagaatgcgggagagctggaaaaggtcaagaagaaaagacgtttggattttctggacatcctcttacttgccagaatggagaatggggacagcttgtctgacaaggacctacgtgctgaggtggacacatttatgttcgagggtcatgacaccacagccagtggagtctcctggatcttctatgctctggccacacaccctaagcaccaacaaagatgcagagaggaagttcagagtgtcctgggggatgggtcctccattacctgggatcacctggaccagattccctacaccaccatgtgtatcaaggaggccctgaggctttacccacctgttccaggcattgtcagagaactcagcacatctgtcaccttccctgatgggcgctctttacccaagggtatccaagtcacactctccatttatggtctccaccacaacccgaaggtgtggccaaacccagaggtgtttgacccttccaggtttgcaccagactctccccgacacagccactcattcctgcccttctcaggaggagcgaggaactgcattgggaaacaatttgctatgagtgagatgaaggtgattgtggccctgaccctgctccgctttgagctactgccagatcccaccaaggtccccatccccttaccacgacttgtgctgaagtccaaaaatgggatctacctgtatctcaagaagctccactaattccgttgtggagctccgaaatctgaaatgagtttcactggcagaaagctgagttggtggtgtgactagccttcttcagaagagtgcttcagagagtcctctcctcctctcttcagtacagatcacccttctcagcactggaatattcctctgctttaaagccagcacccttcccataccccctcttctaaaagccttcccttttacaaatgttcttatgacatcatcaagaccactgaaaaactccaagataatttcccatctcaatattccttactccatctaacctactaagtcccttttgaattatgaggaataattcaatttgttccatgggctccaaaactcaaggcctgagcattattgtgaaacctttattcagcctaatatcatcttcacaagactgttacctggtacgttcatctaaatctcccctgcatagtctctctacctgactattcctcacacaagtttctttaccttccctcctttctccaataaagtgtccagtgtcctgcacaaaaagctcaaggagaactgattatcaccttctgattcgttcattgatgcattcaaattaaacctccacatagtagagactttttcaactattataaaaaccatcctgagccagacctgcagtcaacagcaagagcaggaagcgcataggaactacacctgcaaccaagctggcacaaagaccaagaattctgaagcagcccaaactcaagatgacatatttttacaagttagagaaaaatcaagatctgagttatcttgacaaactcgggatggaaagtaggagggaggggaaagcaaataaatacttccttattgtgtagcataaaaaaaccgaattcgtaggagggaggggaaagcaaataaatacttccttattgtgtagcataaaaaaaccgaat

SEQ ID NO: 1225 - DNA, 657 bp, Rattus norvegicus
gaaggctggcccatgtcagccttgagtctaggcagtagttgctgaggaaggcctcccctaggtgcagctggcagtgggtttcacatggcttcctaccggcttgcatgtcaaacacactgctatcatctgtttggttttcttcctttttcccttttccattgctccacttcttctctcccaccttttatttcaccacagataagtttctttgcttctctcctcccaagactccttcatcaagccggatgtcccacctctctgagctctgcatctgtctgctctccagctgacccagtttctttctagtgcccacccaccctagggccagcacagaccgtgctttcttattgtcacagaggtgatcctcccagtgtaaaataaacactgtacgccagtcctgtttgctattcctttgcccctcattcattgacatttccgtctcagcgcccaataaaactacagttctgctttgtgcatctaagggtactttttttttttttttttacattatatacccccacgagtttttaatcgcagtagttccgtgtacaactttttaaaatgctacccacatgtgcccctctgagttgtggttcctgtgctggagtgaggcccaagtagctatggctttaggaattgtgacagttctgacatgca

SEQ ID NO: 1226 - DNA, 1346 bp, Rattus norvegicus
gaattccgggagacaaccttgtcaagcacctaattgtgccatccgtgcgatgccagccagctccatccaccttacaggagtgaagtcagcgttcatatacgctgtgtggtctggcagctgagatagtgtttcccaaagggactgtggaatgttacctcagcaggcattcatttcgcgtttggaaaatcgtctccaaatgaactttctttccgtgctgggtctgcagaacatttcagaagcggagctagcaatctgcttcaactttttttcccccggtgcttgcagcaggagatgcctgaagggagctgctgcgtggtggtctgaaacatagttcaaggaatagaggtcaactgcctagagcggtgcaggcagggcacaggctggctttgtactctgagtctcaaggtatttcccagtgcctgagccagggggaaggtggggggaggaagggaaggagctgccacttggatcgctattctgggtagccaagacagatagccatacaatggaaattagtggcttcaacttgggggaaaggatggactctaacttcgagctgtgcagttcgcccattgtttgaatggacaaaaggcagtttacccaggctcctagcatacctgcctgggtgtccaaatgtaactagatgctttcacaaaccccacccacaaaacaacacatgttcttaagtcctgggctttgttttcacttcggcctcataatacccactctgacctgctgtgtaaacgacccgggacgtaccaaaatgagcgcacctccaataaagatacacatcatgtcgtcttcacatctcttctacctggcactctgcttgctcacctttaccagctcggccacagccggaccagagaccctttgcggggctgagctggtggacgctcttcagttcgtgtgtggaccaaggggcttttacttcaacaagcccacaggctatggctccagcattcggagggcaccacagacgggcattgtggatgagtgttgcttccggagctgtgatctgaggaggctggagatgtactgtgtccgctgcaagcctacaaagtcagctcgttccatccgggcccagcgccacactgacatgcccaagactcagaaggaagtacacttgaagaacacaagtagaggaagtgcaggaaacaagacctacagaatgtaggaggagcctcccgaggaacagaaaatgccacgtcaccgcaagatcctttgctgcttgagcaacctgcaaaacatcggaacacctgccaaatatcaataatgagttcaataccatttcagagatgggcatttccctcaatgaaatacacaagtaaacattcccggaattc

SEQ ID NO: 1227 - DNA, 805 bp, Rattus norvegicus
gtgattccagaggtgactgtactccccaaaagcccggtgaacctgggagagcccaacatcctcatctgtttcattgacaagttctcccctccagcggtcaatgtcacctggcttcggaacggacagcctgtcaccaaaggcgtgtcagagacagtgtttctcccaagggaggaccacctcttccgcaaattccactatctcaccttcctgccctccgtggaagattactatgactgtgaggtggatcactggggtctggaggagcctctgcggaagcactgggagtttgaagagaaaaccctcctcccagaaactaaagagaatgtcctgtgtgttctcgggttgtttgtgggtctggtaggcatcgtcgtcgggattgtgctcatcatcaagggccttcggaaacgcaacgcagtggaacgccaaggagccctgtgagataccgggaggtgatggcttccgtgagagctcatagaagaaatgtgctgtgacagcatctgaggctaccccttctctcagctcttcacctcagcagagacatcttctgcagtttccaacctcaagcctcgcgccagattctctggtctaatgtctggctggggttctccgtctgcttcctgtatctatattctattttccatcatttatagtaattcctctgtggcacatatcacagagctcttcctccgctgcggaactttctaagaatggaggcatcttctgttcacttacggcttgacatttctccaaactgtgttttctctttctctttttcaataaataataaacaccttgggtcctgaat

SEQ ID NO: 1228 - DNA, 982 bp, Rattus norvegicus
gggagctgacagcagccacgcggggaagatggctgaggacttcggcttcttctcgtcgtcggagagcggggcccccgaggccgccgaggaggacccggcggccgccttcctggcccagcaggagagcgagattgctggcatcgagaatgactcgggtttcggggcacctgccgccagccaggtggcctctgcgcagcccggactcgcgagcgggggtggttcggaggacatggggactacagtcaatggagatgtgtttcaggaggctaacgggcctgccgatggctacgctgcgattgcccaggcggacaggttgactcaggagcctgagagcatccgcaagtggagagaggagcagaagaaaaggctgcaggagttggatgctgcctcgaaggtgaccgaacaggagtggcgggagaaggccaaaaaagacctggaggagtggaaccagcgccaaagtgaacaggttgagaagaacaagatcaacaacaggatcgctgacaaagcgttctaccagcagccagatgctgataccattggctatgtggcatcggaagaggcttttgtgaaagaatccaaggaggagaccccaggcacagagtgggagaaggtggcccagctgtgtgacttcaaccctaagagcagcaagcaatgtaaagacgtgtcccgcctgcgctcggtgctcatgtccctgaagcagacgccactgtcccgctagtgcctgtcaccacgggccttggtggggcagagcagcagctgcttcagccagggtggaacttctctggcagctgccacacacgcctgttctgttcctctgagtctctgggagctgggaagcgggacccttacccctttcacccaccctgtccttcctggtcccctgttccagcccctcatgactcctgtcagtccacttgattgtgactgtccctcctgatgtatttttcttggcttaaagggtgtgttaactctttttacactt

SEQ ID NO: 1229 - DNA, 1112 bp, Rattus norvegicus
ttagtccgagtggagcgagcgagtcgagtggttgtctgttctggtctcggaaaccggtagcccttgcagcatggctgaccaactgactgaagagcagatcgcagaattcaaagaagctttctccctatttgacaaggacggggatgggacaataacaaccaaggagctggggacggtgatgcggtctctggggcagaaccccacagaagcagagctgcaggacatgatcaatgaagtagatgccgacggtaatggcacaatcgacttccctgaatttctgacaatgatggcaagaaaaatgaaagacacagacagtgaagaagaaattagagaagcgttccgtgtgtttgataaggacggcaatggctacatcagtgcagcagagcttcgccacgtgatgacaaaccttggagagaagttaacagatgaagaggttgatgaaatgatcagggaagcagacatcgatggggatggtcaggtaaactacgaagagtttgtacaaatgatgacagcgaagtagagaccctgtacagaaggtgttaaatttcttgtacagaactgttaatttgccttttctctgtttgtaacttatctgtaaaaggttccccaattgtcagaacatgcatgtatagtaattaggattcattcttccatgttttttccctatcttctgtcattgtccttcaaccttattttagaaaagtgatcaagtaccatgttgcatgtggcttctctggatatatctaagccttctgcacatctacacttagatggagttggtcaaagggaacatctgggttatgaccttttttacagtagcttttaggaaccgtcggcatgttgctgttgaagtgtggagttgtgagcgtggactgtggacagtcgacagcgtgtactaagagttgcactactgcaagcgggtgttctgtccggtactcactcgtacactatttttttgtactgctggtattgtaccagaaacattttcttttattgttacttgctttttaaactttgtttagccacttaaggaagatctgcttatggcacaatttgcctcaaatccattccaagttgtatatttgttttccaataaaaaaaaatgacaattt

SEQ ID NO: 1230 - DNA, 2909 bp, Rattus norvegicus
gaattccggggcggcggccgcggggatcccgcgagcggcccctgaacatctacccttcttgccgggacccgggaggtccccactggcctccgggcccgtcctgatcagactcgtgtcgacctccccgtccacgcgcatccgggagagccgcgccacgagacggacccgggcccgccgggacccctggtgtctggccctgcgtcgagaggctggtgactgccacccataagctccagcttcagcctcggcttactcccctcaggggcttgcaggctgaggcctgccctcggacgcggctgaccagcctctccctctcttccacactttggacttctctttggacctcctaaaaaggctccatcatggcaccgttcctgcgcatctccttcaattcctatgagctgggctccctgcaggcggaggacgacgcaagccagcctttctgtgccgtgaagatgaaggaggcactcaccacagaccgagggaagactctggtacagaagaagcccaccatgtaccctgagtggaagtcaacattcgacgcccacatctatgaaggccgtgtcatccagatcgtgctgatgcgggcagctgaagaccccatgtcggaggtgaccgtgggcgtgtcagtgctggctgagcgctgcaagaagaacaacggcaaggctgagttctggctggacctgcagcctcaggccaaggtgctgatgtgtgtgcagtatttcctggaggatggggattgcaaacagtccatgcgtagtgaggaggaggccatgttcccaactatgaaccgccgtggagccattaaacaggccaagattcactacatcaagaaccacgagttcatcgccaccttctttgggcagcccaccttctgttctgtgtgcaaagagtttgtctggggcctcaacaagcaaggctacaaatgcaggcaatgcaacgctgccatccataagaaatgcatcgacaagattatcggccgctgcactggcactgctaccaatagccgggacaccatcttccagaaagaacgcttcaacatcgacatgcctcaccgattcaaggtctataactacatgagccccaccttctgtgaccactgtggcactttgctctggggattggtgaaacagggattaaagtgtgaagactgcggcatgaatgtgcaccacaaatgccgggagaaggtggccaacctgtgtggtatcaaccaaaagctcttggctgaggccttgaaccaagtgacccagaaagcttcccggaagccagagacaccagagactgtcggaatataccagggattcgagaagaagacagctgtctctgggaatgacatcccagacaacaacgggacctatggcaagatctgggaggggagcaaccggtgccgccttgagaacttcaccttccagaaagtacttggcaaaggcagctttggcaaggtactgcttgcagaactgaagggcaaggaaaggtactttgcaatcaagtacctgaagaaggacgtggtgttgatcgacgatgacgtggagtgcaccatggtggagaagcgggtgctggcgctcgcctgggagaatcccttcctcacccatctcatctgtaccttccagaccaaggaccacctcttctttgtgatggagttcctcaatgggggcgatctgatgttccacattcaggacaaaggccgcttcgaactctaccgggctacgttttatgcagctgagatcatctgcggactgcagtttctacatggcaaaggcatcatttacagggacctcaagctagacaatgtaatgctggacaaggatggccacatcaagattgctgacttcgggatgtgcaaagagaatatatttggggagaaccgggccagcacattctgcggcactcctgactacatcgcccctgagatcctgcagggcctgaagtactcattttccgtggactggtggtcttttggggtcctcctctatgagatgctcattggccagtcccccttccatggtgatgatgaggacgagctctttgagtccatccgggtggacacaccacactacccgcgctggatcaccaaggagtccaaggacatcatggagaagctcttcgagagggaccctgccaagaggctgggagtaacaggaaacatcaggcttcacccctttttcaagactatcaactggaacctgctggagaagcggaaggtggagccgccctttaagcccaaagtgaaatccccttcagactacagcaactttgacccagagttcctgaatgagaaaccccaactttccttcagtgacaagaacctcatcgactctatggaccagacagccttcaagggcttctcctttgtgaaccccaaatatgagcaattcctggaatagtgagctcccagacctgcttttaatgccccggcagagtaggcccatctgccctggtttgcatcctcactgcccatgaagaagagtgggtgactggtgattcctgctgctgccccctcttcctcggagagtctggctcctgttggctgggctcacagtacttcctctgtgaactgtttgtgaatttgccttccttttgccatcggagggaaactgtaaatcctgtgtgtcattacttgaatgtagttattgaaatatatattatatatatgcacatatatataataggctgtatatattgctcagtatagaaagcatgtaggagactggtgatgtgttgacctttttttaaaaaaaaccatatgtatacgtgtgtatgtatacatctacacacgtatacatatatgtatgtatgtatgtatgtatgtatgtatatatgaccaaaagaaaagagagcacaagctacctgaaccacaggattgtttatgtgtgtataaataaacactgaatggtaaaaaaccggaattc

SEQ ID NO: 1231 - DNA, 3112 bp, Rattus norvegicus
cgcagaacttggggagccgccgccgcgattcgccgccgccgccagcttccgccgccgcaagatcggcccctgccccagcctccgcggcagccctgcgtccaccacgggccgcggccaccgccagcctgggggcccacctacactccccgcagtgtgcccctgcaccccgcatgtaacccggccaacatccggcgagtgtgccctcagtagcttcggccccgggctgcgcccaccacccaacatcagctctccagctcgcacgtccgggatggcagcggccaaggccgagatgcaattgatgtctccgctgcagatctctgacccgttcggctcctttcctcactcacccaccatggacaactaccccaaactggaggagatgatgctgctgagcaacggggctccccagttcctcggtgctgccggaaccccagagggcagcggcggcaataacagcagcagcagcagcagcagcagcagcgggggcggtggtgggggcggcagcaacagcggcagcagcgctttcaatcctcaaggggagccgagcgaacaaccctacgagcacctgaccacagagtccttttctgacatcgctctgaataacgagaaggcgctggtggagacaagttatcccagccaaactacccggttgcctcccatcacctatactggccgcttctccctggagcctgcacccaacagtggcaacactttgtggcctgaaccccttttcagcctagtcagtggccttgtgagcatgaccaaccctccaacctcttcatcctcagcgccttctccagctgcttcatcgtcttcctctgcctcccagagcccacccctgagctgtgccgtgccgtccaacgacagcagtcccatttactcagctgcacccacctttcctactcccaacactgacatttttcctgagccccaaagccaggcctttcctggctctgcaggcacagccttgcagtacccgcctcctgcctaccctgccaccaagggtggtttccaggttcccatgatccctgactatctgtttccacaacaacagggagacctgagcctgggcaccccagaccagaagcccttccagggtctggagaaccgtacccagcagccttcgctcactccactatccactatcaaagccttcgccactcagtcgggctcccaggacttaaaggctcttaataacacctaccagtcccaactcatcaaacccagccgcatgcgcaagtaccccaaccggcccagcaagacacccccccatgaacgcccgtatgcttgccctgttgagtcctgcgatcgccgcttttctcgctcggatgagcttacacgccacatccgcatccatacaggccagaagcccttccagtgtcgaatctgcatgcgtaatttcagtcgtagtgaccaccttaccacccacatccgcacccacacaggcgagaagccttttgcctgtgacatttgtgggagaaagtttgccaggagtgatgaacgcaagaggcataccaaaatccacttaagacagaaggacaagaaagcagacaaaagtgtcgtggcctcctcagctgcctcttccctctcttcctacccatccccagtggctacctcctacccatcccccgccaccacctcatttccatccccagtgcccacctcttactcctctccgggctcctctacctacccgtctcctgcacacagtggcttcccatcgccctcggtggccaccacctatgcctccgtcccacctgctttccctgcccaggtcagcaccttccagtctgcaggggtcagcaactccttcagcacctcaacgggtctttcagacatgacagcaaccttttctcctaggacaattgaaatttgctaaagggaatgaaagagagcaaagggaggggagcgcgagagacaataaaggacaggagggaagaaatggcccgcaagaggggctgcctcttaggtcagatggaagatctcagagccaagtccttctagtcagtagaaggcccgttggccaccagccctttcacttagcgtccctgccctccccagtcccggtccttttgacttcagctgcctgaaacagccacgtccaagttcttcacctctatccaaaggacttgatttgcatggtattggataaaccatttcagcatcatctccaccacatgcctggcccttgctcccttcagcactagaacatcaagttggctgaaaaaaaaaatgggtctgggccctcagaaccctgccctgtatctttgtacagcatctgtgccatggattttgttttccttggggtattcttgatgtgaagataatttgcatactctattgtactatttggagttaaattctcactttgggggagggggagcaaagccaagcaaaccaatggtgatcctctattttgtgatgatcctgctgtgacattaggtttgaaacttttttttttttttgaagcagcagtcctaggtattaactggagcatgtgtcagagtgttgttccgttaattttgtaaatactgctcgactgtaactctcacatgtgacaaaatacggtttgtttggttgggttttttgttgtttttgaaaaaaaaattttttttttgcccgtccctttggtttcaaaagtttcacgtcttggtgcctttgtgtgacacaccttgccgatggctggacatgtgcaatcgtgaggggacacgctcacctctagccttaagggggtaggagtgatgtttcaggggaggctttagagcacgatgaggaagagggctgagctgagctttggttctccagaatgtaagaagaaaaatttaaaacaaaaatctgaactctcaaaagtctatttttttaactgaaaatgtagatttatccatgttcgggagttggaatgctgcggttacctactgagtaggcggtgacttttgtatgctatgaacatgaagttcattattttgtggttttattttacttcgtacttgtgtttgcttaaacaaagtgacttgtttggcttataaacacattgaatgcgctttactgcccatgggatatgtggtgtgtatccttcagaaaaattaaaaggaaaataaagaaactaactggt

SEQ ID NO: 1232 - DNA, 668 bp, Rattus norvegicus
aggatctgaaaacggtgactccacccaaggtctccttgtttgagccatcagaagcagagattgcagacaaacaaaaggctaccctcgtgtgcttggccaggggcaacaaccctgaccatgtggagctgagctggtgggtgaatggaggagatccgcatggggtcagcacagaccctcaggcctacaaggaaagcaacaatatcacctactgcctgagcagccgcctgagggtttctgctaccttctggcacaatcctcgcaaccacttccgctgccaagtgcagttctatgggcttacagaggaagacaactggtcagaggactcacccaaacctgtcacacagaacatcagtgcggaggcctggggccgagcagattgtgggattacctcagcatcctatcaacaaggggtcctgtctgccaccatcctctatgagatcctactggggaaggccaccctgtatgctgtgctagtcagtgccctggtgctgatggccatggtcaagaaaaaaaattcctgagacaaactttatgcatcctgagctgttctttaccctggccatggattttcccgcaccttctccaatccctgttcctaaggacttgtctcctctccctccatggaaatctaccattcctcattaaccccttgactatgaaacagactg

SEQ ID NO: 1233 - DNA, 630 bp, Rattus norvegicus
cggatccccaggtctgtccccaaaatgcctgtggacttcaatgggtactggaagatgctgagcaacgagaatttcgaggagtacctgcgtgcgctcgatgtcaacgtggccttgcgaaaaatcgccaacttgctgaagccggacaaagagatcgtgcaggatggcgaccacatgatcatccgcacgctgagcacttttcgaaactatatcatggacttccaagttgggaaggagttcgaggaggatctgacaggcatagatgaccgcaaatgcatgaccacagtgagctgggatggtgacaagcttcagtgtgttcagaagggagagaaggagggacgtggctggacccagtggattgagggtgatgaacttcacctggagatgagagcagagggtgtgacctgcaagcaagtgttcaagaaagtacactagagcggcccgagcagataaccttggtctcgaggaacaagtagggatggcccaatggtcaggagccctctctgcctagcacagggctgaaacacatagccaccccaggtttgtgccagcagagtctgtctcattgccttgtctcttttccttttcttaaaatgaagctaccccaataaaagtgatctctgtttaaaaaaa

SEQ ID NO: 1234 - DNA, 1635 bp, Rattus norvegicus
ggtcaagcgagctggattctagggaaacatagaagagtaatcatccagagaggggctctggtggagctcactagccattgactgttcttttcagaagtctggactccctgacctacaaggcctctcaagctaaaggacacttctctgtgaagggagcctctgatacattgcctatagcaagaagaaggggccaacctgaagaaaaacatgccatctgcacttgctttcgtcctacttgttctcaacatcagcctcctgaagggacagtcaccaccagggaaacctgagatccacaaatgtcgctctcctgacaaggaaacattcacctgctggtggaatcctgggacagatggaggacttcctaccaattattcactgacttacagcaaagaaggagagaaaaccacctacgaatgtccagactacaaaaccagtggccccaactcctgcttctttagcaagcagtacacttccatctggaaaatatatatcatcacagtaaatgccacgaaccaaatgggaagcagttcctcggatccactttatgtggatgtgacttacatcgttgagccagagcctcctcggaacctgacattagaagtaaaacagctaaaagacaaaaaaacatatctgtgggtaaaatggtccccacccaccataactgatgtgaaaactggttggtttacaatggaatatgaaattcgattaaagcctgaagaagcagaagagtgggagatccattttacaggtcatcaaacacagtttaaagtttttgacctatatccagggcaaaagtatcttgtccagactcgctgcaagccagaccatggatactggagtagatggagccaggagagttccgttgaaatgccaaatgacttcaccttgaaggacacaaccgtgtggatcattgtggccattctctctgctgtcatctgtttgattatggtctgggcagtggctttgaagggctatagcatgatgacctgcatctttccaccagttcctgggccaaaaataaaaggatttgatacccatctgctggagactggttctccaagcaaatacaaggtggatctgtacctggcccttcctggaggattccagaaactggacaatgcaggggaacttgactactgaagctgcagactcaaataggagcctctcaaaatgggttctaccaccatcgcaacaaatgctgagaacaagacagaaatttcccagtgccaataatctagtatccaggacgcctgcctggttagactttaaatttgctcaatgacaaacgagatcagtgttaattgtgtttcttgagcagctctcgtttgtttttctcttttgtcagcctcagccatctgccatcttgatccctcagtctcacgtggtgatatctatctttctgtgtgtgtgtgtatctctgtgtgtctctctgtgtcatctctctgtctctatgtgtctctgttcctctgtgtcttcctttgtcctttgtgttctctctctctctctctctctctctctctctctctctctctctctctctccaacttgcttcatgcttttctgggcttgagtgtgcttaagaaaacacattttacgatcatcagaataaccccccctttaaataaaaaactgtcc

SEQ ID NO: 1235 - DNA, 6257 bp, Rattus norvegicus
ggagcaaccagattttgtggtacagaatttagcattgaatataaggggtattataccaagcctctacagggcacttagcctgcatcccaatcccacccaatccccacacacacttcttttggaagacaaggtccacgtagcctgacctagaacttgtactgtagctgagctgaccttgaacttcaggtcctccctacttcacttcccaagtgctgaggttgcaggtgtgaccaccatgcaggccctgtgggcaaaatcttgcccagggaaggaagttagtcctgatctttgggactttgaaggatgggaccttgtgtacccttacctaggaaacaagaaaaagtcattgtgactacaacattgttcagggcacatgacactccccaggaataacctgaatcctcgtattctagaaccaaagagtggcaggcatggtaatgtgcaccataactatttatcttattttattttattggtttgtgttgagacatttctatatataaccctggctgtccagaaactcactatgtagaccaagttgatctacatcacagattattagagcctagaatcacagagatctgcctgcctctggcatcaaagtgctgggatttcaggtgtgcaccactatacccagctcccaaacttctaataggaacaataaaatcagtgatccagaatccaggtccacgacagcaacatttttgcccttctcaacaaaaaggaaacgacatatatgaggggagcttgcagccttcttggctgtcactggtgcaaagaatttgttctaatggctgatttctgaggataatcttggtcttgaggtgcaggacctaccttagagctgtgcgctgggggtcactttctcctccatccacctattacaccccttcactattacccctgaccttgccatttggctttaatcaccaaaacatgaacaggtactggagaaccaggcactgccctacccaatctcagccctgggaaggtatccagggtgacctagagcctactggacagcaggtgcaacagggccctcccctcccacagccaagagggtgagagcacggaatccacctccgtcagcaagggaggggcttagccagcatatgagtgccaacaggacaggggtggggctgggggagaactaggagtttttaaaggctccccaaggaggctcctcagctccaagatcaccacctgctgcccctggacacctgataccatgtggttcctgatcctattcctcgacctgtccctggggcagattggtgagacacggggggaagctggtggggtcacacccctgactgttatgctgcctttggccctggatatccccttctcctctcccctggccccagctacattctaaagcaccacttgttcctcactctctgcccctgcacactgccaagtccctcacagtcctccgatgccaggcccctgttctctcccattttccagaactgtctcctcttccttagccgcctgattgtctctgagcttctccagtctttccaaagaatctttccaacccctgatgaacgttaggacctcggttcccctctctttgttgttttccctagagcctaataatgcaacccctgagtcaggagcttgcccaaatcccacaatagagctcttggctgtccagcagctgtcagcttcagctgtgttctccacatcatgacaactggtcctccatcttctcaagttgctcagtttctattgacagtttcatttcccaaattggcttgtgacatcagatgagtctccccacactttctgctgtggggaattggcctatggcccttctccatgactttttggttacgtctggttttgggaggaggaatcaggtgtcagaagccattcatggacatcaaggatcttcctcgatcacttggatagggtctcactgaatggggagtttctctttaagctaacttggctgtctggaaggactcaggggactcctactgcttccacctctggtgttacaggggcacactgccacacctgaccttttacctaggttctggggagttcagatcaggtcctaatgcttacacagccaatactgtagcaaccaagccatctgcccagctcttgggaataagcactgagctagtgtctcatggtgaaattctggcttgtgtctggtccatggccttcctcctgcctcagccttctgtgtgctgggattacagataagtgcttgcaagcttccgtgtttcctaacgcagtgctttggcccactattccctcccatgctgcccactctcagccacacactacttgttgtttctagccccaccagctcctgtcctacctcgctggaaccccactgcacaactctaggtcccattctgtgcaggacatcccaagacccaacacgtaaccctagcaccccacaccaactgggtcctcctgtctgtcgcacagtggtctgacttgtttaactccttttccacccctgtgctgtcttgaggctgcctccaagagaaccctgaacctcaccaacacactgatcatttgcccctgcccactccgtgggaagcaggaccttcccctcacatcccccaaagtctccttctcccactgcttgtccaggctcaaactatgttcttagggagccccaccctcttaggtatcatctccaacacagaccctaacaggagaccacacccaatcctcgaccctgcccctttgatctggaaacccctcattctcttctatgccagctggttgcctcatgcccaatccaataatcccgaagtcatcctgaagctcccgtttctgcattcatttattccctcaaatctagttatcagggggcctcaccctttccagaattcccaaaacccaaccaaggccctgatgtcttctcaagctttggagactttaaatgcgaaagtgtcttggcctctgatttcactctcattaaactaggaatgctctctctctctctctctctctctctctctctctctctctctctctctctctctctctctctctgactgcctgccatcccataactttgttacccaacagtacatccataccccctatctgttccaaccataccccaccccctgtgcacctgttacagatgctgcacctcccggccagtctcgggttattggaggatataaatgtgagaagaattcccaaccctggcaagtggctctatacagcttcacgaaatacctctgcgggggtgtcctgatagaccccagctgggtgatcacggctgcccactgctctagcaagtgagtaacggaggggacaggaatgactagaggacgggctgggttgctgaagggcaggagggtgggactggctcaaagacaaaagaggacaagcaggactggacccatggtctgtccatgacctcctgtgtctgtctttgcttctctctcaaggcttgtgttcatgttctggttctttcttttctatcttattgttcatgtctcctgtctgtattcacatctgagtgtctctatggccatctgtatctctgtgtctcctcctcctcttggcccatctcagtctgggtctgggtctcatgtgtcctcttttattactactgacaatactgacctaaaggcctctaggatacaaagtcatatccttgactgtagggtgtccctgaatgtagggtgtgagagaagtcctcactctcctcagaccagctcagcctttagaccttctgtccactcacaggacacagggaagggcaggtcagagctggagctgggtgaagtaactgagtacagagggagagcagatgctggtgtgggggaggggagttagggaaggggagctcagacttgggctgtgggccaggccttacctactggggaagttcagcccagttccagctgcacctgagcagctctcagtccctccccctcctcccttccccctcttcccttgttctgtctctgtctctctgtctctaaatgtgtgtatatatgtgcctttctgtgtgtgtgtgtgtgtgcatgtgtgtgtgtatgtatgtgtctgtgtatgtatgtatgtgcaagtatgtgtgtgtttctgtctgactctctcttcctttctccctccctccctcatcccccttttcctctattctgcccaatctccctggttgcctcttctctttcaatccatctcctttcctgccctcagcaattaccaggtttggctgggccgaaacaacctattagaagatgaaccatttgctcagcaccggcttgtcagtcaaagcttccctcaccctgactacaaaccattcctcatgaggaaccacacccgaaaacctggcgatgaccacagcaatgatctgatgctgctacatctcagccagcctgcggacatcacagatggggtgaaggtcatcgatctgcccactgaggagcccaaggtggggagcacctgccttgcctcaggctggggcagtaccaaaccccttatatgtaagtctgagccaggaaacacagctgggtgtgagggagaggcacagaggacctggctgggttctgctcaccaccctcttgcctcctggtccacaggggaattccctgatgatctccagtgtgtgaacatccacctactgtctaatgagaagtgcatcaaagcctacaaagaaaaggtgacagatctgatgctgtgtgcaggagagttggaaggaggcaaagacacttgcacggtgagacagcccctcctgcggtgaggtgaagggctgagagagggaactgaggttctcaattcccacttccacaccctgtctaagcagacgcttggtttccttccttatggaagtgatgtgagctgggaggggaggatcctggagctggtactattcctcctcattgacttggcttcagggactggcctgtccacccctcactcgctgtaagagctgggctcccaggagctgggttcccttccctactggccacaactgtctcttagagtctccctgtattcctcccatgaagtctagttccaggttgtcaagtagaacccaactgccaattccttcttactcttttccctctcctttcagggtgactcaggaggccccctcctctgtgatggtgtgctccagggcatcacatcatggggctctgtcccatgcgccaaaaccaacatgccagccatctacaccaaacttattaagttcacctcctggataaaagaagttatgaaggaaaacccctgagtgtcacactgtcccctggtctcaataaaacccatcatgcagcacacaagttcaagttctgattctctctcaccttctggagtctggagctggggtctgcccagctaaggtcaggacttccaaagcagattggcaatggataggggtccatgtatggttggataaagggattggcttgagacaaaggcagacaaaaggctcagaccatgtcagggatggcccagggttctcctctggcaagtagcatgttcagatcacaaagtttagtcaagttagacacagtagaaagatcaactccagctaggccggaccctacaccaaaagcagaagagatgacaagcagtcaggacactgagaatttagactgccgacctgcttttatcgagtcggggaagccagaaagatggcgggatgttatattaattaagcctttacttcttggggagttgtctgtccacagaagggtaggtactgccccccaaggctaggctgcagagtatctcctagagcccctggaacccctggagcccctggagcccctggagcccctggaacccctggagcccctggagcccctggagggtatatctctggtagggctggaccaaagatgaagggtgacttagcggcatgccctgtggcagagcatcgcccggcttgggaaaagggccacattgctcccactgccttggactacaaaccagtgtgtgcccagagtgatatagccgcagctgagagtattggaggactttcagaggagggtccctgccaagactcaggcagtaaggagtgggccctagagtggggactggggcttgccacctgtgtccccagggtgctacctgctctcaggggaagtatgggacctcaaggaagatctgatggaaactgagccacagggaccgaggtagaggcatcaggctgcggggactcatcagtgtcctgagaagttgcgtcgtccctctgttggggaggctcgaggtatttcacaaaattgcttgcagtagacagcttctgggcgggctccaagctt

SEQ ID NO: 1236 - DNA, 2176 bp, Rattus norvegicus
atgctgctcctcctggccagtctcgggttgttggaggatataaatgtgagaagaattcccaaccctggcaagtggctgtcatcaacagatacctctgcgggggtgtcctgatagaccccagctgggtgatcacggctgcccactgctatagccagtgagtaagggaggggacaggaatgactccaggacaggctgtggtactgaatggcaggagagtgggacgggctcaaagtctaaagaggtccagcggggctaactggcctatccatgacctcctgggtctctttgctcctctctccaggcttgtgttcatgttctggttctttcttttctgccttgttgttcatatgtctcctgccttcattcacatctgaatgtctctgtggccatctgtcactctgtgtctcctcccccggtcttggtccatctcagtctgggtctgggtctcatgtgttctcttttattactactgacaatactggagaacaggcctaaaggacactaggatacaaagtcatgtccctgaatgtagggtgtccctgaatgtagggtgtgagagaagtcctcactctcatcagagaagcttgcctttaggatcttctgtccattcacaggacacagggaagggctggtcagagctggatctgggtgaggtaactgagtacagagggagagcaggatgtggcagtggggtaggggagttagggaaggggagctcagacttgggctgtgggccaggccttccccactggagaagttcagcccagttccatctgcacctgaacagctctcaagtcctcctcctcctccctgtcccctcttcccttgtctttgtatctgtctctctgtctctaaatgtgtttgtatgtgtgtgtgtgactgtctctgtgtgtgtatgagactttctgtgtgcatgtgtgtgtgtgtgtgtgtgtgtgtgtgagtttctgtctgactctcttctttcctccctccctccccaccccctttccctgtactctgcccaatctccctggttgcctcttctcattcaatccatctccttcactgccctcagcaattaccatgttttgctgggccgaaacaacctatttaaagatgaaccctttgcacagtaccgggttgtcaaccaaagcttccctcaccctgactacaacccattcttcatgaagaaccacaccctatttcctggggatgaccacagcaatgacctgatgctgctgcacctcagtgagcctgcggacatcacagatggggtgaaggtcatcgatctgcccactgaggagcccaaggtggggagcacctgccttgcctcaggttggagcagtaccaaaccccttgagtgtaagtctaatctaggaaacacagctgggtgtgagggggaggcagaaaggacctggctggggtctgctcaccaccctcttgtctcctggtccacaggggaattccctgatgatctccagtgtgtgaacatcaatattctctctaatgagaagtgcatcaaagcccacacacagatggtgacagatgtcatgctgtgtgcaggagagttggaaggaggcaaagacacttgcaatgtgagacagcccctccctgcagagaggtgaagggatgagagagggaattgagattctcgattcccacttccacaccctgtctaagcagatgcttcacttccttccttatggaagtgatgtgagttgggaggggaggagctgcagctggtactattcctccttttgacttggattcagggactggcctgtccaccctttactcccctgaagagatggcctcccaagagctgggttcccttccctactggccagagctgcctcttagagtctccctgtgtcttccccctgaagtcagttccaggttttcaagtagaacccaactgccaactccttcttattcctgtccctctccttctttcagggtgactcaggaggccccctcctctgtgatggtgtgcttcaaggcatcacgtcctggagctctgtcccatgtggcgaaaccaataggccagctatctacaccaaacttattaagttcacctcctggataaaagaagttatgaaggaaaactcctgagtgtcatactgtgccctggtctcaataaaacccaccatgcagcacacatgttcaagttctgattctctctcgacttctggag

SEQ ID NO: 1237 - DNA, 12728 bp, Rattus norvegicus
tgttgggaacttctacagtggaagtggagctgtctctgactctttttccagatcttgggacccttttcctcctcttgggtcatctggcctttatatgaggttttgtacccagtcttaatatatatccccaggaggattgctctttgccaaaggaaaacagagaagtgatctggggaagtagggaatggaggactgggaaactttggtcatgatgtgttgtatgagaaaaaaataaatttaaaataaaatgacaactgtccctggtagtctaggagacttaattaatgagcagattacaaaaccacaactgaggtttgaaggacaaagtagtctgcactaatagttcattcagagaacattcaggttagaatactgtgtatggtgtacagcatcattttatatagatgaaagaatcatgagccataaataactcaaaaatctgttacttcatgatccactgccatgttttctagtgcatccaaagatgcatagttacataaaaattataaggcttaaactaacatcttttctgtattatcagttagaggacaatgtgacacaaaaagatttcttcatcgtttaaaactaccaatggtccacaatatctctagaaccataacagaaaagtgaatatgaggctgtaaaaaagaaatactcagtattcttacgtgcatcgacatcttgtgatgcagagagggtggaccagtgcctgcactgcctgaatgaacaaatactcgaaacaaatccaataaaaatcctcatcttttttcttcagaatttggcaaaatgttttcgaaaagcattctccacttactttttcacaaatgagtggggctgttggaggactagtgatacctcttcaggtgcacttgcctagcatgtgcaagaccctgggcttggtccttggcactgaaaatattaacatacacatacagtcagaatatctcaaagttggttaactttatctgctgctacatttttgcctccatggaattttctggctgatttgacatgaaatgggatccagatgctgttctgctctcattttccaaacaggccattagcgctgtggtgccagatcagaagttaagtatttgcagcctagtgccgtctttggtctggaatgagcgataaatagttggtagtgctttgcaaaaacctttcccctacaaacaaacacgtgcaaacatgatctgaatgcatgcccactatgctgaccagtgccagggggaggacagcttcccacccccaggactgacctatgagttggtgaggtattcctgcatgtgctcaccagcactgactggtgccagcaaccagagtattgagaaagcccagcctcattcatgtcaggtcagtagatgcaatttctaagaggtaaaggctccaaggttcagcctttgaaatgatagccaactgcagctaataataaaccagtaccttaggccaagggagaagagtgattattggctgatgagccaccctccttctcaaggatacattataaaatctttgtttctcttcagcaaattcctacaagtttacagtggagccccagtggcaccatggcggttcttggcatcaccattgccttgctggtgtgggtggccaccctcctcgtcatatccatctggaagcagatctataacagttggaacctgcccccaggacctttccctcttcccatccttgggaacatttttcagctggatttgaaggatatccccaagtctttcaccaaggtaaggggaaacattgtttcattaagaaagcaagttaaagattagatataatggatatatattaaactcattgtcatttgttatccaatgacagactaccatgttactgaactaacagttcagttcatcctgggcatggaacactcacagtgaatagtgccatgcaggcccggagccctctgcagttaaagtgactatgagatactgatgttgctggtatcattctgtgccaactgatacaacaacaggtgtaccctggctggtatcaacctgtgccaaagaacagactgaaaaggaaaatactgagctgaccgtgattcaccagaataacagcatctgccttttgctaatgctgtgaacactgtgtgggctaagcagccccaaatgctatcaggcatgggattaatgcttggtgtctttgcacacagcagggtagctacaggtttcaggagcactgagtccaagttagcttgtactgtcagataaggcagagcttaactttagaagcaaacaaaagggtaatgagtgctggcattggctgaataggcacagagaagagaatcgtgtctagatagaaggcaggtcccccgcaacccagcaacttaaggtggaaaaagtatccccctatcagacgagacaaaatgccctttcccccaagtccgtctaactcctgtgaagtacagtacaggagcaatagcaggagacacggtctatctaaagcaggccgagccctgtctatcttctgtgcattggtccctgcagttggcaaagcgcttcgggccagtgttcacactgcaccttggctcaaggcgcatcgtggtcctgcatggctacaaggctgtcaaggaggtgctactgaaccacaagaatgagttttctggacggggggacattcctgtgttccaggagtacaagaacaagggtaagttggcttcttaggacattgggaggtggggcaaactaacagaaagtaatgtaggtaccatttgatcctctgaatcgtagtgacagcaacagagtaaagacagaggcaaaggctcagatgatgggtgagcatgaatgctgttttgaggcttgtaatgggcaagcattgcgaacccagtgacacctccagacccccatggtcaccatatccctgattgacttacagagaatgacagatgggttgtttctgaacaggaagtctcccccggagaattcctcctcaggccctcgtgctttcctacagttcttgggactttccactcagcctcagctatctctgagctgtagctggttccatgcacccaagtcctttcacttacctatccttgcctggcactctacttgtggaacgcaccaggctttaggtgagctagagagagacagagagacagaatgagagagagagagagagacagagacagagacagagacagagacagagagacagacagagagacagagacagagagacagagtgacagagagacagagtgacagagagacagagtgacagagacagagacagagagacaactgttctgccctgaatcttgttcacctgttctcccctgcagatgggaatgtgggctaattttcccatcttcacagctccatcttctactgagtgtgggcacccagaaccagagctactcccagctcgctggtgccacctgtctgcccagcctccgtcttacctgcaccttcttacttcctctttttcactccaggtacccaaagcagatgagaaataaggtgccctgtgattctgcctgaactagcactggtgatacatttctacaaagctttttccttttgtatgagatttcagatcaaagcatggctggctctagatcttattctcagtgtctggcttggcttcccagtttgtgtttccaaaactattttacctcaagcatttgatgtcccctgatcaatagtgtgggtttctgtactatctcggggtggggggaacaaataactagctcagtctttgtcctcaatataggagttactgattgaagagggaccatgcaaggtgacaaggactgctgggaagggcacaaacctttatgtgccctctagtccagctcaggcaatgggccagtgcaatcagggtctgcctcttcacaggctagattcaaaaggcctttgctgctcctgcctggggctccaaagtcatattttcatgctatctacacagaagagggtgcttgtaaaatcagctgggccttaggtaaagatgctttgagtctctagtgtccattgtgtgaatgattgttctaataacgttaagcatgggtgtgcggcaaatgtaccaaaataagtgcacgcatcatttgagcaaatgctgagaaagtgtggttctgacctagaaagtcagcctactgaaaggccccagctctgccactctctcagccactggcctttaactttcaggataaaactgacccacaatgcttagctcatgtcacatatatccctttcccctctcaggctggccatatcttgttctagaaagttctttagaccataataagcatatgtctcctagaacttccacattttctgttgtgtgttccactaggcatctcacatgtgattagactgttaaaatggaagagattatcaaattacaagcaagctctacaccccatgtagttataactcattatagtttgtctccgaatactcagagcctagtaagtgccttagacacagtagataccaaaacattatttattgaagaaaagataggaaacaaggagtagggaggtgttaaagaaagagaaagacccctggagtgtagagaggccagagggttttactaggcaagagttgagagaaactgggcagggctgtccctggataccttgaactggttccaaggggatccaaaagctccaagagacaagttttgaggaatgaaaaaaatgcccacaaaattagctgagctagagataaaaagaaaaattctttttagagttgttgattcccagtgtcctcatgggggtcacaaggctatgttctaggaggaaaaacaatacattatgtttggaaggaaagtacaccgtaacatttcattgagagaaaataatacttggtctttctatcttaatgtctccaaactgggaaatcttctgaccttttgattttagtaaaagatgtagctttgaaaccataaagccttgagttgaagggcttatgttgagaaggttaaaatccatgagcttggatatgctgcttaagatttctatcagtagacaaaaagaggagagtccatttttagagtggctgcctacagttatttagcatggcaagattcagagcaaaggatgaaaccaaaaaaaaaaaaaaaaagttcagaagaaacaagtatgaaacacagcctttcactcccttttcctgtgcttctctgcacctgtacatcccccgcccccgcccccgcccccagtacccaagtgcagcttttaatgctacttcaagggttctttgttaatgtttcttttaatgcctccttttcctacaaacagtaaccagttctcttaacagccagccctcctcccagcttccagccctcctcccagcttccagccctcctcccagcttccagccctcctcccagcttccagccctcctcccagcttccagccctcctcccagcttccagccctcctcccagcttccagccctcctcccagcttccagccatttcaaaggtttttcccaaccattcctccctcaggtccccagcagtccacataaacagtccttctcccaattttcctaattctagcagttccaaactgtaacaactattctagcctatctgctcggctctgctcagcttctcttggctcacctgccgacaactgtctgtcttctcactctgctagcccaattccctctcaactgtcccgtaacagtatcttctctggctcagctcagcttcttctgcaactgtcttctgtttgaactctgatcaatcttttctgcacagacttctcttctttagcccctattggatcttctttctgcaccaactgtcttctctaaccctcatctctgaccatactcttctaccgcctggcccctaatcccttctctcagcctctgctggcatttcatatgctctcctcttcccagaagtccaaaaggcaacaggacattgaaggtcatagggccaagaagttctcttaaaggaccaattgactagcaactagagattctttaaagggccaggcacacaacataaatcaccctacacccaagaccatttcctcctccttccttacttctccaagaattgggtatttatagtatcccatcggtctctttttcttagggattattttcaataatgggcccacatggaaggatgtgcggaggttttccctaagcattctccgagactggggaatggggaaacagggtaatgaggcccgcatccaaagggaggcgcaattcctggtggaggagctcaaaaagaccaaaggttagtatctcagcagtccagaaggattgtgggcaggctgaacactgaacaacacggaggcagttggcagctggggaaggcagaggtcaagttggtcccctggcactgccttctcaatttgagtcccagctcattctaggagagcaaaagtggctgccaggcatgactgctgttcccttagtagccttaaaaagtaaagacacttggaggctcccacattcactgtgtcctcagtgcaaactcaagaagactagaatggctagagaaggccatggtgagatactcacactctacctattttccaggccagccttttgaccccacatttctgattggctgcgcaccctgcaatgtcattgcggatatcctcttcaacaaacgtttcgactacaatgacaagaagtgtctgaggctcatgagtttgttcaatgaaaacttctacctgctgagcaccccctggatccaggtgaccatgcttctcctttgccacacgccttccgtcacgctgttcctgttagagccagagggaaggtcaggttgcctaagagagacaggcctagaaaagcaaactacaggaacacacagtagggcatttgaccaggttggctcagcatcttctcacttcaggactgtgtacacttgactgtacccattcctacacacacgacttggaaagatggcattatccccaaaagatgccattagacccaatattctaagtagtgtggtaaagacaaccataagttcattgtttagaggttcctatcagttacacagttttgttctccttagctttacaataactttgcggattatctacgatacctacctggaagccatagaaaaatcatgaaaaatgtgtctgaaataaaacagtacacacttgaaaaagccaaggaacaccttcagtcactggacatcaactgcgcccgggatgtgactgactgtctcctcatagagatggagaaggtacagaacaggacgggctcgctgggatgggcagagtgcttccaggtcttacattatgacccactctctggtgtccacgctgagcaccgtggttgcatcttgatgaccatggtttttcataaacacacttggcttcagcatgacaccattctcttctctggtcacttttggatggcagagaccctctgttcaacaccttccaggccaagatgaactgcaactctttgggaaatctacccttgtctgagaaaacttgagcatacactttgttatttcttaatcaatcaatgttgcttaaacttccaaagttctaggcacccctgccttcattttcctgcagcctctaagactcttgaatgcctaccccttactttcttgctgtaatggcttgaaaccatgtaaaattctacactgatttcctctagataatctccacttgaggattgctatcagctcagtctctttctgtccctggtccaaaaagcatggccttaagcctgaaaagaggctgagcctagcgcctccagcttagaaggtcattatcattatcagataactctggcacttaccgaggcaagaccctgtggcctggttaagaaaccctttcctgtgctttgcctatttcctggaaaacatcagtttccctcgtcatgaggcagaaagagctgtttcctgatagcacaaggagtctgagaaaatctggttccctccctgatgaagagcaataggcatcactttcttacacctaaagagatcttaccaggtccctgtctgtctccaacttcacaggaaaaacacagccaagaacccatgtacacaatggaaaatgtttctgtgactttggccgacctgttctttgcaggaactgagaccaccagcacaactctgagatatgggctcctgatcctcatgaaatacccagaaattgaaggtacatgaaactcccatgcgtcacagctgagacttgtcagggccactctgtgcaattcaggcctctgtagctctcactaaccttcagggacccagtcactcaatgaaattttttaaaaagcacatgatgttgtatgtgccaggacctagcaccctgaagactggctagtcctgaacacactccactgggatgtttatagcccagtgctgaaatggaaaggggactgagtctatgatctgctctgtaaataatttctgattagaaaataatgttccagttttccctgagaaacatctcctgggtttataggctgagacaggatgcgagccaggccagagtcatcccagagcatcttaaccccagggagctctgaagtgggaattgaaagagaagcaattgaggctgtcctaaatacatttcacttcctcatcaagactttgaaaccaaaatctgggcaggaagaattctgtgcctgaagcaggcatgcaaaagatctaaacacatttaccagatagaggaagtgtgatcacccccacatgtaagtcactggggctcaccttagtagagaaactgagagggctgacagcctaaggtgaaggtgctcaaaggcctgaaaccctaccatcctctgagctgagcttagatctggcagctactgcatacaaagtaatgtttcccaagaacatggttgtgtgtctatctagtccaggaccaagatctgagctctggccttccggtcagcaatgcctttgactttccacaccacataaaaaaagaaaaaaaaaaccaaaaggtgactaaagttcaaggaggaaaatgtacaaattacagtagttagaacttttactactatgctagggaaacataaaatttaaaatgttttaaattattagtataatgaatttctaatatagtcaaggagcaagtaaatgtgacaggcacccatatatcaattaccaaactgaactcctattgacattttgtgatgtttgctttggagctgtttaaaaaataaaccattatacagcgagctggagccccactcactccccagatacagtgatgcttcagggccactatgtagcatcccccatgtgacttagacatttaatgttaactaaatatcaacatataacattattttattttattcatgctttagtattataccataccatacccaacttattgcaacttgcttttttcactccacgtattataagatccatagcaaatcccacagcaacgaccaaggaacttgacaatggttggttgctgtacctctgacatagtcatggtgacttttagatttcagaaactatagtctagtctgccaccctctgcttatttttaacaatagtaaactgtcctagagtaataatgcaaagattccccttagaaatttccaagactcttttatctctactccagctataaagagaattggaaaaacgatcaccaactatgacaacagatgcccaaactgtcaactgtgaataagctcatgggtctcagctttcactgacatttataaggaaatgatttaacaattgaaagtacttggggattacaaacgcagttaagtgctccataaacatacaatgggtggtagatacatgaagaaaaactaggtatgtaggtgaatggagctactggaggatagttggatggatgagtggatgagtgggtgaatgaggatgtaaggatggagaggtactattctggcgggtaaatgaataggtaagtagatggaaaagtgtgtgggttacaggggtagataagtgagcaggtagatggaaatgtatgggtagatggtacgtagacatcaattctggaattaacccttgagattgaccttattcaaatcttggcagagaaacttcatgaagaaattgacagggttattgggccaagccgcgtccctgctgtcagagacagactggatatgccctacatggatgctgtggtgcatgagatccagagattcatcaatcttgtcccttccaacctaccccatgaagcaaccagagatactgtgttccaaggatatgtcatccccaaggtcaggcaagagttggaaagtactccattggcactgttctattggtttatcaccttggttgcccttcaggatagagactcaagggcactgttgaccagcatatattgttagatgtgggaatcaagccagcattcattcttgccctgcagaatgtttcacccaaagtcaccccaataacctcatgaccaaagaaatgaaagaaatggaaagtgtcacctcaactggtccagaggacttgtagaactctctaaaactgagatcccatgaaagcagcaacccagcctgggacccgtcctatcaaagatacagggccttccttttcatttagacctgatctgatccctgtctctttttctaagtcatcctgaaataaacaacactacaaattaaaaatatgctagcctacatatgtagaattccaacagccctgtccgctgagatcccccagataaaagcctgtgtttaacctgactgatagagccctctacttctcctagggtacagttgtgattccaactctggactccctcttatatgacagccatgagtttccagatccagagaagtttaaacctgagcatttcctgaatgaaaatgggaagttcaagtacagtgactatttcaaggcattttctgcaggtaagcagagtctgggagtcacaccttccctgggaaagtgtcttcagtcctaaacttacttcccacgtgctcttccccatcctagatgaggtctaccatcccaactccatcactccttgtaatgtataacccaagtacattcctccctgtttagaaagtcaaatggcacacatctcacaaggaatctaggaaatgagagttctgggtagattatcacagaatggatgtggtttcctaattaatttttcagctatttctactctaaccagatgcagtaaaaagctctcaaaactgtattacctaattcttcataagtttcaacaaaaattgctaaactctattctttatctacctagattcttcttaggaagcatccagacctcctcagatggtcccatcgcagggcctcacctagggttcctgtaaagggagataccatagccagtttgataactttaatggcctgtttacataggcttcacctgtaccatctggatgttttgggtctatttccctaaactaccacttatttatgcagtggagttctcaatgagtggtgtcagtagctggtccctaagtcagtgccactgccattcttgttctctgacatatgatcactggtgttcagggaccaatgggcagggatgatgaatcctactttaaggtggtgtgcctgaagcctcctcccacactccaacacttgatgttatcagtgctagctttgcaagggtccctcagtacctcatcagcactgttgtcccttctaggaaagcgtgtgtgtgttggagaaggcctggcccgcatggaattgtttctgctcctgtctgctattctgcagcattttaacctgaagtctctggttgaccctaaggatatcgacctcagtcctgtcacagttggctttggcagtatcccaccccaatttaaactctgtgtcattccccgttcatgagacctgaaaacttcctgatatcccttccattgttatcccttaaactatgactgtttttaaaaaacccaagcatatagagttcctatcataaaatgaaaccgaaaaaataaataaaaccttgatgaattgtattggttgtggatttaatgagaatcttatccccttgccatgtgaaagttccccagggagtaagatgcatttcacagccagtagtataatcttccaatctatctgtccctgacttctcataatttgtttgcatatgcacagatgaccctggctatctgcccatcacaagacactgaattaacaatatattcaaagttcttttaccatacagtatcatattcataggctcttgggattataatgtgagcagttttatgctgaccctactttccagctcatctaccttggggtactactgaaacccaaagctaacagacaccacaacagtggcctcactgaaggcgtttggatcatcatagctccacaatggcaagattgcttccaggggaaaaaaatgtaattttaaaatttgctttggggcagagatgtttcaacttcatagattaccattagcaaaattctcaagtgacaagggaaagataggatgtatgtagctctaggagccattaactaattgtggtattatctggctactgtctaaggttgacacctggtcagcagagtcaccaattatcttctctcagtggtaaagcttgagatggttcaaggaagggtcattaacgtcacaaatacagttccaaaaaggcatgcttgcacatatctttaaacccagcactcaggagacataggcagacagatagatctctgagagtctaaggccagcctggtctacttagaaaattccaaaccagacagaactaaaaaaatgagactctgtctcaaaacaaagagacaaataacaggagtagagttccttagaagaattc

SEQ ID NO: 1238 - DNA, 523 bp, Rattus norvegicus
cgatgaaggccgtgtgcgtgctgaagggcgacggtccggtgcagggcgtcattcacttcgagcagaaggcaagcggtgaaccagttgtggtgtcaggacagattacaggattaactgaaggcgagcatgggttccatgtccatcaatatggggacaatacacaaggctgtaccactgcaggacctcattttaatcctcactctaagaaacatggcggtccagcggatgaagagaggcatgttggagacctgggcaatgtggctgctggaaaggacggtgtggccaatgtgtccattgaagatcgtgtgatctcactctcaggagagcattccatcattggccgtactatggtggtccacgagaaacaagatgacttgggcaaaggtggaaatgaagaaagtacaaagactggaaatgctggaagccgcttggcttgtggtgtgattgggattgcccaataaacgttccctatgtggtctgagtctcagacggcatctgctgcctgctaaactgtaaaaaaaaa

SEQ ID NO: 1239 - DNA, 2468 bp, Rattus norvegicus
cagaagccagaccatccaaggttgactggccacttggagcggaatcaggagacattcccaactcagggagactgaggtgagggccctagctcgcccacttgctggacaagatgatattccttaccaccctgcctctgttttggataatgatttcagcttctcgaggggggcactggggtgcctggatgccctcgtccatctcagccttcgagggcacgtgtgtctccatcccctgccgtttcgacttcccggatgagctcagaccggctgtggtacatggcgtctggtatttcaacagtccctaccccaagaactacccgccagtggtcttcaagtcccgcacacaagtggtccacgagagcttccagggccgtagccgcctgttgggagacctgggcctacgaaactgcaccctgcttctcagcacgctgagccctgagctgggagggaaatactatttccgaggtgacctgggcggctacaaccagtacaccttctcggagcacagcgtcctggacatcatcaacacccccaacatcgtggtgcccccagaagtggtggcaggaacggaagtagaggtcagctgcatggtgccggacaactgcccagagctgcgccctgagctgagctggctgggccacgaggggctaggggagcccactgttctgggtcggctgcgggaggatgaaggcacctgggtgcaggtgtcactgctacacttcgtgcctactagagaggccaacggccaccgtctgggctgtcaggctgccttccccaacaccaccttgcagttcgagggttacgccagtctggacgtcaagtaccccccggtgattgtggagatgaattcctctgtggaggccattgagggctcccatgtcagcctgctctgtggggctgacagcaacccgccaccgctgctgacttggatgcgggatgggatggtgttgagggaggcagttgctgagagcctgtacctggatctggaggaggtgaccccagcagaggacggcatctatgcttgcctggcagagaatgcctatggccaggacaaccgcacggtggagctgagcgtcatgtatgcaccttggaagcccacagtgaatgggacggtggtggcggtagagggggagacagtctccatcctgtgttccacacagagcaacccggaccctattctcaccatcttcaaggagaagcagatcctggccacggtcatctatgagagtcagctgcagctggaactccctgcagtgacgcccgaggacgatggggagtactggtgtgtagctgagaaccagtatggccagagagccaccgccttcaacctgtctgtggagtttgctcccataatccttctggaatcgcactgtgcagcggccagagacaccgtgcagtgcctgtgtgtggtaaaatccaacccggaaccctccgtggcctttgagctgccttcccgcaacgtgactgtgaacgagacagagagggagtttgtgtactcagagcgcagcggcctcctgctcaccagcatcctcacgctccggggtcaggcccaagccccaccccgcgtcatttgtacctccaggaacctctacggcacccagagcctcgagctgcctttccagggagcacaccgactgatgtgggccaaaatcggccctgtgggtgctgtggtcgcctttgccatcctgattgccattgtctgctacatcacccagacaagaagaaaaaagaacgtcacagagagccccagcttctcagcgggagacaaccctcatgtcctgtacagccccgaattccgaatctctggagcacctgataagtatgagtccagagaggtctctacccgggattgtcactgagagccccaggagagtgagaagcgcctggggtccgagaggaggctgctgggccttaggggggaacccccagaactggacctcagttattcccactcagacctggggaaacgacccaccaaggacagctacaccctgacagaggagctggctgagtacgcagaaatccgagtcaagtgaggaagctgggggctggccctgtggctcaccccccatcaggaccctcgcttggcccccactggccgtgggctccctttctcttgagagtggtaggggtgggggcgggaaggggcggggcaggaaacagtgaggtcttaggggcccggcctcccctccttcccggctgctcctctctgccaacatcctgcacctatgttacagctccctctcccctccttttaacctcagctgttgagaggggtgctctgtctgtccatgttatttattgttatcctggtctcctgtccccttacccggccccaggacctgtacaaaagggacatgaaataaatgtcctaatgacaagtgccagtctagacccatcctttggaggaaaggggcatattagtaatacttttctcgttgctgtaacaaaatactggacaaaaacac

SEQ ID NO: 1240 - DNA, 3327 bp, Rattus norvegicus
aacggcgggatataacatgagctgtcttcggtatcgtcgtatcccactaccgagatatccgcaccaacgcgcagcccggactcggtaatggcgcattggccccagcgccatctgatcgttggcaaccagcatcgcagtgggaacgatgccctcattcagcaatttgcatggtttgttgaaaaccggacatggcactccagtcgccttcccgttccgctatcggctgaatttgattgcgagtgagatatttatgccagccagccagacgcagacgcgccgagacagaacttaatgggcccgctaacagcgcgatttgctggtgacccaatgcgaccagatgctccacgccccgtcgcgtaccgtcttcatgggagaaaataatactgttgatgggtgtctggtcagagacatcaagaaataacgccggaacattagtgcaggcagcttccacagcaatggcatcctggtcatccagcggatagttaatgatcagcccactgacgcgttgcgcgagaagattgtgcaccgccgctttacaggcttcgacgccgcttcgttctaccatcgacaccaccacgctggcacccagttgatcggcgcgagatttaatcgccgcgacaatttgcgacggcgcagtgcagggccagactggaggtggcaacgccaatcagcaacgactgtttgcccgccagttgttgtgccacgcggttgggaatgtaattcagctccgccatcgccgcttccactttttcccgcgttttcgcagaaacgtggctggcctggttcaccacgcgggaaacggtctgataagagacaccggcatactctgcgacatcgtataacgttactggtttcacattcaccaccctgaattgactctcttccgggcgctatcatgccataccgcgaaaggttttgcgccattcgatggtgtcggaattccgggcggtcctcccagcaactgctgtggacgctgaagcgtgctccagtctattcacagcaatgcctagtggtgtcccgaagtctcagttctgtggaatatgagcctaaagaaaaaacttttgataaaattcttattgctaacagaggagaaattgcttgtagggtcattaagacttgcaggaagatgggcatcaggacagttgccatccacagtgatgttgatgccagctcggttcatgtgaaaatggcggatgaggctgtctgtgttggcccagctcccaccagtaaaagctacctcaacatggatgccatcatggaggccattaagaaaaccggggcccaagctgtacacccaggttatggattcctgtcagaaaacaaagagtttgcaaagtgtttggcagcagaagatgtcactttcattggacctgatactcatgctattcaagccatgggtgacaagatagaaagcaaactgttagccaagagagcaaaggtcaacacaatccctggttttgatggggtactaaaggatgcagatgaagccgtcagaattgcaagggaaattggctaccctgtgatgatcaaggcctcagcaggcggtggtgggaaaggcatgcgcatcccgtgggatgacgaagagaccagggatggctttagattttcatcccaggaagctgcttctagttttggtgatgatagactactaatagaaaaatttatcgataaccctcgtcatatagaaatccaggttttaggggataaacatggcaatgctctgtggctcaatgagagggagtgctcgatccagagaagaaaccagaaggtggtagaggaggcgccgagcatttttctggatcctgagacgcgccgagccatgggagagcaggccgtggcttggccaaaagcggtgaagtattcttctgctggaactgtggaatttcttgtggactcccagaagaatttttacttcttggagatgaatacaagactccaggttgaacatcctgtcacagagtgcattactggcctggacttagtccaagaaatgatcctggttgctaagggttacccactcaggcacaagcaagaggatattcccatcagtggctgggcagttgaatgtcgggtttatgctgaggacccctacaagtctttcggtttaccgtctattgggagactgtctcagtaccaagagcctatacatctacctggtgtccgagttgacagtggcatccaaccaggaagtgacatcagcatctatcatgaccctatgatttcaaaactagtcacatatggatctgacagagcagaagccctgaagaggatggaagatgcattggacagttatgttatccggggtgttacacacaacatcccactgcttcgggaggtgataatcaacacgcgttttgtgaaaggggacatcagcactaagtttctctctgatgtgtatcctgatggcttcaaagggcacatgttaacacccagtgagagagaccagttattggctattgcatcatccttgtttgtggcatcccagctacgagcacagcgctttcaagaacattcaagagttccagttataaggccagatgtggctaagtgggagctctcagtaaaattacatgatgaagaccatactgttgtggcatccaacaacgggccaacatttaacgtggaagttgatggctcgaaactaaatgtgaccagtacgtggaacctggcctcacccttattgtctgtcaacgttgatggcactcagaggactgtgcagtgtctttctccggacgcaggtggaaacatgagcatccagtttcttggcacagtgtacaaagtgcacattttaaccaaacttgctgcagaactgaacaaattcatgcttgaaaaagtacccaaggacactagcagcgttctgcgttccccgaagcctggagtggtggtggccgtttccgtcaagcctggagacatggtagcagaaggtcaggaaatctgtgtgattgaagctatgaaaatgcagaacagtatgacagctggtaaaatgggcaaggtgaaactggtgcactgcaaagctggagacacagttggtgaaggagacctgctcgtggagctggaataagtacttgtagcccttcagtcaccactgctcactgctttaattagcatttccattattctctaaccctcaatttgctcaggcgtttacaggagcactctgcagcaggttctacagcatcgtatttattccttagaagagggcaaaaccgacactctgccaaaaaaatcaccaatgggaatttttattgatataaatacttgtacatatgatttgtacttctgctgagatttcccagtgtcaaaattaaatcaataaaaccaacggaa

SEQ ID NO: 1241 - DNA, 58 bp, Rattus norvegicus
acacgtggtaccatgtggctccagatcctgttcctcgtcctgtccgtgggacgaattg

SEQ ID NO: 1242 - DNA, 2445 bp, Rattus norvegicus
ggcacgggacacggaagaaacggggagcaaaatgaagggagagctgttgtgcgtcctgctgctttgtggagtggcgttcacgttgcctgaccagggaatacacaggaggttcagaagaggagctcggtcctacagagcgacctgcagagatgaacagactcagacaacttaccaacagcatcagtcatggctacgtcccatgctcagaggcaatcgggtggaatactgccggtgcaacagcggcctggcacagtgccactcggtgcccgtccgaagttgcagtgaaccgagatgcttcaatgggggtacgtgtcagcaggccctgtatttctctgacttcgtctgccagtgccctgacggatttgttgggaaacgctgtgatatagataccagagcaacctgcttcgagggccagggcatcacctacagaggcacatggagcacagcagaaaatggggctgaatgcatcaactggaatagcagtgccctgtcccagaagccctacagtgcaaggaggccaaatgccatcaagctgggccttgggaatcacaattactgcagaaacccagaccgagacgtgaagccctggtgctatgtctttaaggcagggaagtataccacggagttctgcagcacgccggcttgccctaagggaccaactgaggactgctatgttggaaaaggtgtgacttaccgtggcacccacagctttaccacatccaaggcctcctgcctcccatggaattccatgatcctgataggcaagacttacacagcgtggagggccaactcccaggcacttggcctgggcagacacaattattgccggaacccagatggggatgccaaaccttggtgccacgtgatgaaggaccgaaagctgacatgggaatattgcgacatgtccccatgctccacctgcggcctgaggcaatacaaacagcctcagtttcgaattaaaggaggactcttcacagacatcacctcacacccttggcaggccgccatctttgtcaagaacaagaggtctccaggagagagattcctgtgtggaggggtgctgatcagttcctgctgggtgctatctgccgcccactgctttgtagagaggtttccaccccatcatcttaaagtggtcttgggcagaacatacagagtggtccctggaaaggaggagcagacattcgagatcgaaaagtacatagtccataaggaatttgatgacgacacttatgacaatgacatcgcattactgcagctgaggtcagattccagtcagtgtgcccaggagagcagttctgtcggcactgcctgcctccctgaccccgacgtacagctccctgactggacagagtgtgagctttctggctacggcaagcatgaggcatcctctcctttcttctctgaccggctgaaggaggctcacgtcagactgtatccgtccagccgctgtacctcacagcatctgtttaacaaaaccatcacgagcaacatgctgtgtgcaggagacacccgaactgggggcaaccaagacgtccatgacgcgtgccagggtgactcaggaggccctctggtgtgcatgatcgataagcggatgactttactgggcatcatcagctggggcctcggctgtgggcagaaggacgtgccagggatatacacaaaggtcactaattacctgaactggatccaagacaacatgaagcaatgacaaagaaagcccagctccttaaacccagaggacctgccttcctcttcctcttccacagaagatacgcctgaaaggccaagcgttcttcgcaggctcgtcctcctgagctgccgctcagcagagggagtgacagtctttaggcacagacagagtttactttgtgacaggtacttcacaaacttgtacgttttaagggtgaaggtctgactttagaatcagttctgtcagatgagatgacagggaaatgccaaccttcctataactctaagattttaaaaagagaagtagaccaaagtccacccttcctggaccactattttgtacactgaaccacaagatcgtgtctcaacagtgaaatacaacttgatctttcaggagtaaaagtctgcactgaggacaagaatgtgtttttatagttacacaggggcccagcatggcctccaagagaaggaaggggttagctgatcagaccacagccccctaaaacccttgaaatcaaatattccccatcctcccacaatcctcaactcttggggcatatccctttgtacacagtgtagatgtctttttctttataaactttccagatggctgggagaactgtatgattttaatattcgatgaaatgacactagtatatttatatttgaatctatttagtttttactgtgttactagaactctgtattatgctgtactgaaataataaattccaaggtatttttcacactttt

SEQ ID NO: 1243 - DNA, 3053 bp, Rattus norvegicus
cccccgagagctttgtgaaggaggaacgctgcacacccgcctcccgcagcacacagccaaccacagctgagcgacacgcaacaagagccaatcacaaggcacttccgaaagctccaggatgcagatgtcttcagccctcacttgcctcaccctgggcctggttctggtctttgggaaagggttcgcttcaccccttccagagtcccatacagcccagcaggccaccaacttcggagtaaaagtgtttcagcatgtggtccaggcctccaaagaccgaaatgtggtcttctctccctacggcgtgtcctcggtgctggctatgctgcagctgaccacagcagggaaaacccggcagcagatccaagatgctatgggattcaatatcagtgagaggggcacagctcctgccctccgaaagctctccaaggagctcatggggtcatggaacaagaatgagatcagtactgcggacgccatctttgtccagcgggacctagagctggtccagggcttcatgccccacttcttcaagctcttccggaccacggtgaagcaggtggacttctcagaggtggaaagagccagattcatcatcaacgactgggtggagaggcacaccaaaggtatgatcagtgacttactggccaagggggctgtaaatgagctgacacgcctggtgctggtgaacgccctctatttcaacggccaatggaagacccccttcttagaggccagcacccaccagcgcctgttccacaagtctgatggtagcaccatctccgtgcccatgatggctcagaacaacaagttcaactacactgagttcaccactccggatgggcacgagtacgacatcctggaactgccctaccacggcgaaaccctcagcatgttcattgcagcaccctttgaaaaagatgtgcccctctccgccatcaccaacattttggacgctgagctcatcagacaatggaagagcaacatgaccaggctgccccgcctcctcatcctgcctaagttctctctggagactgaagtggacctcagagggcccctggagaagctgggcatgactgacatcttcagctcaacccaggccgacttcacaagtctttccgaccaagagcagctctctgtagcacaagcactacaaaaggtcaagatcgaggtgaacgagagcggcacagtggcgtcttcctccacagccattctagtctcagcccgcatggcccccacggagatggttttagaccgatcctttctctttgtggttcggcacaatccaacagagacaatcctcttcatgggccagctgatggagccttgagagtgggatgagaagcctttcctttgggacaaaactggacgtgttataagcagagactctgaagaaaagaattgttttaaggactctttggggagaaagagaaggcctttctttcttaccccggcactggtaaatctttccaaccagcctcccagacctcagactctcgaagaggaaagagtctaactccctcactagggacctatcttactaaggtctcatccaaccatagaactcacagaatctggatctgcccagcattcagcctttggacccagttcccaccaaggccccagcagggccaacccactacgccttcactcagcaaagtcttttgtgttccagtcacactctgggtacctcttgtatcgtcctccattgctatgaaggatgacccaggccaaaggaagaagcactgtcctatctcaaggtccactgtggaaatgaacaccttgcccatccccaaggggcagcagatagacagatcgaatgatcgcccgatatcaagccttctcccagctcccgtcctgccctcccttccctgacagccgccttgtgttatttcagagtgtagatgacttgtttacagcttttttcgacccacaaacttttctcattttgaaagcgtgaaagaaaggtcagatgtgcacgtgccttgctctttatcctgggtctccctgtgaggggagaggggtcctggggagattccaggggtgtgattgaatatttatcttgtttatcttatacgtttgttggggagaagaagcactattaaggagaaagccttttatttaaaccatggcatatggtgtcccatttggggtctgtatccctgtatgtcagggaggcatcactccacaaacccgcccctcgggtggcccggcgtcggggctcacactgccgcctagtggcagccgaacacgcccttgccccatccctcccccgcatcctcccccgtggctcttttccttagggatcttgccaaggtgatgcttggcagcccacggtaaaggaagggggaaaaagattaggtgggagagagagagagagagagagagagagagagagagagagagagagagagagagagagagagagagagaaagagagagagatgtttgagagagggcaaagtggtttcaaatttttccaatacattcagaagccgagtgggaaagggggctgtgtgacctaacaggacagaactttctccaattactgggtgactcagctgcactggtgactcacttcaatgtgtcatttccggctgctgtaagtgagcagtggacacgtgggggggggggggtgaggatgaaagaaacagccagctcctggtcaaccaccttagttagataatcttttttgaaagcttcctagctgggggtatgatcagaaaaccaatttactgaaaaactgcacaggaaggtaacgtgaatctaatttcatagcgggccgctctgcatccgttacatctccactggaaaaaaataatcattttctttttgtgtgtgtgtgtgtgttttagcttttctccctctccctctttctctctcatttcattatgcactggataaccatacaccgtgtaccacaggggcccaaatgtggggtcacatggtcttgaattttgtggggtacatatgcctttgtttgtttgttttcacttttgatatataaacaggtaaatgtgtttttaaaaaataataaaaatagagaatatgcagac

SEQ ID NO: 1244 - DNA, 521 bp, Rattus norvegicus
gtgaccctgaggtgctgggccctgggcttctaccctgctgacatcaccctgacctggcagttgaatggggaggacctgacccaggacatggagcttgtggagaccaggcctgcaggggatggaaccttccagaagtggtcatctgtggtggtgcctcttgggaaggagcagaattacacatgccgtgtggagcatgaggggctgcctgagcccctttcccagagatggggcaggtacagctcccagagctccgttgtgtctctcccagattgtgaagcatgaagacagctgcctggagtggactgagtgacagacgatgtgttcaggtctctcctgtgacatccagagccctcagttctctttagacaccagtgtctgaagttccctgtgattctatggcttcagtgtgaagaactgtggagtccagcctgccctacacaccaggaccctgtccctgcactgcctgtgttgcctaccacattcagccttgctggtccagcctgggggtggagggtggggag

SEQ ID NO: 1245 - DNA, 1160 bp, Rattus norvegicus
ttgtcagcaagacctcgctccccttacagtaactctcatctagacgtcgcaactccgccaccatgtttgaggcacgcctgatccagggctccatcctgaagaaggtgctggaggccctcaaagacctcatcaatgaggcctgctgggacatcagttcgggcggcgtgaacctacagagcatggattcgtctcacgtctccttagtgcagcttactctgcgctccgaaggcttcgacacataccgctgcgatcgcaacctggccatgggcgtgaacctcaccagcatgtccaaaattctaaaatgtgctggtaatgaagacatcattacattaagggctgaagataatgctgataccttagcactagtatttgaagcaccaaatcaagagaaagtttcagactatgagatgaagttaatggacttagacgttgagcaacttggaatcccagaacaggagtacagctgcgtagtaaagatgccatctggtgaatttgcacgtatatgccgggaccttagccatattggagatgctgtggtgatctcctgtgcaaaggacggggtgaagttttctgcgagtggggagcttggcaatgggaacattaagttgtcccagacaagcaatgttgataaagaagaggaagctgtgtccatagagatgaatgagccagttcagctaacttttgctctgaggtacctgaactttttcacaaaagccactccactgtctcctacagtaacactcagtatgtctgcagatgtaccccttgttgtagagtataaaattgctgacatgggacacttaaagtattatttggctcccaagatcgaagatgaagaaggatcttaggcgttgctagaaattgagaaactaaacctttgacgatcgcttctgagatgccagcgtgttctgaggtcttttctgtcaccaagtttgtacctgagtattcttaaatattaaaataaaatgtagatatcttctgtaaataaccttttttttcctctccataatttgcttacagaataagctccaaagtaaaaactggttttgttaacataaatgtctctgccttacaaatactggtgattttcataaatgatcttgacgctaaatgcagttttaagaaatatttttcaatttaaataaagttaactgaatttg

SEQ ID NO: 1246 - DNA, 3320 bp, Rattus norvegicus
ctccctgcccaccagcatcatggccaagggtttctacatttccaagaccctgggcatcttgggcatcctgttaggtgtggcagccgtatgcaccatcatagctctgtcggtggtctacgctcaggagaagaacaggaatgcggagaactctgccatagcccccacgctcccaggcagcacctcagccaccacctcaactaccaaccctgctatagatgaaagcaaaccttggaaccagtatcgcttgcctaagactcttatacccgactcctaccaggtgaccttgaggccttacctcacccccaacgagcagggcctgtacatcttcaaaggttccagtactgtccgctttacctgcaacgagaccacaaatgtcatcattatccacagcaagaagctcaactacaccaacaaagggaaccacagggtggcgttgcgagccctgggtgacactccggcacctaacatcgacacaacggaactggtagagcgcacggagtacctggtggtgcacctgcagggctccctggtaaagggccatcagtacgagatggacagtgagttccagggggagctggctgatgatctggctggcttctaccgcagcgagtacatggaaggtggcaacaagaaagtggtggccaccacacagatgcaggctgccgatgctcgaaaatcctttccttgcttcgatgagccagccatgaaggcctcattcaacatcacgctcatccaccccaacaacctcaccgctctgtctaacatgcttcccaaagattccaggacccttcaggaagatccttcctggaacgtcactgagttccaccctaccccgaagatgtccacatacctgctggcctatatcgtgagcgagttcaaatatgtagaagccgtctcacccaatagagtccagattcgaatctgggctcggcccagtgccattgatgagggccatggtgattacgctctgcaagtcacaggccctatcctaaacttctttgcccaacattataatacagcctaccctctagaaaaatctgaccagattgccctgcctgacttcaacgctggagccatggagaactgggggctcgtgacctaccgagagagtgccctggtctttgaccctcagtcctcctccattagcaacaaggagcgggtggtcactgtgattgcccatgagctggcccatcagtggtttggcaacctggtgaccgtggattggtggaatgacctgtggctgaacgagggctttgcctcctatgtggaatttctgggtgctgactatgcagagcccacctggaatctgaaagacctcatagtactgaatgatgtgtaccgtgtgatggccgtggacgcgctcgcttcctcccacccgttgtccagccctgccaacgaggtcaacacgccagcccagatcagtgagctgtttgacagcatcacctacagcaagggagcctcagtccttaggatgttgtccagcttcctgacagaggacctgttcaagaagggcctttcgtcttacctccacaccttccaatactcgaacaccatttatctggacctgtgggaacaccttcagcaggcagtggacagtcagacagctatcaaactcccagcctcagtgagcaccatcatggaccgatggattctacagatgggttttcctgttatcactgtgaacaccagtacgggagaaatctaccaggaacacttcctcctggaccccacttccaaacctacccgcccctcagattttaattacctctggattgtgcccattccgtatctcaaaaatggaaaggaggatcactactggctggagaccgagaaaaaccagagtgcagaattccaaacatcctccaatgaatggctcttactgaacattaatgtaaccggctactaccaggttaactatgatgaaaacaactggaggaagattcagaatcagctgcaaacagacctttctgttatccctgtcatcaaccgtgcgcagattatccacgactccttcaacctagccagtgctggaaagctatccatcactctgccgctgagcaacaccctcttcctggccagtgaaacagaatacatgccctgggaggctgccctgagcagcctgaactacttcaagctcatgtttgaccgctcggaggtctacggccccatgaagcgctatctgaagaagcaagtcacacccctcttcgcctacttcaaaatcaaaaccaacaactggctcgaccgtcctccaacactgatggagcagtacaacgaaattaatgccatcagcaccgcctgttctagtggtctcgaagagtgtagggatctcgttgttgggctttatagtcagtggatgaacaactctgataataacccgatccaccccaaccttcggtctactgtctactgcaatgccattgctttcggtggtgaggaagagtggaactttgcttgggaacagttccggaaagcaactctggtgaacgaggcagataaactccgctcagccttggcctgtagcaacgaggtgtggattttgaacaggtacctgagttacactctgaaccccgactacatccggaagcaggatgctacctccaccatcgtcagcatcgccaacaacgtggttggacaaactctagtttgggactttgtccgaagcaactggaagaaactgtttgaagattacggcggaggatctttctcctttgccaatctcatccagggagtgacccggcgcttctcctctgagttcgagctgcagcagctggagcagtttaaagaggacaactcggccacaggctttggctccggcactcgggctctggagcaagccctggagaagactaaagccaacatcaagtgggtgaaggagaacaaagacgtggtactcaagtggttcacagaaaacagctagttagtcccgggccgagaaccatctgtcccggcgtgacgcctatgactatctcagcagcctgtgcagggtctctgtcttcagagcgccagacaccggcatctgaccctcaaggtcaaagtctccagcctatggagctagcctagctcctaattgtcagactgccagacacctcccggtccttgcccctcgtgccaactctgccccaggcccaggcctctggggctgatctcagggaagcccagctctgagtctagatttactggacaaagggtagcctagaaagagtctccctgaatgccttactactttccccccacaagacccagaaccaaagaatcaacagggcacaaagatctatatatatttttaagagaaaatgtaaataaagaatttctaaaatgag

SEQ ID NO: 1247 - DNA, 1733 bp, Rattus norvegicus
gacttgggaggaaccagggcctacacttagccctggtaaacagcagagcatgctgggataattcttcccagaaaaggaaaagcaggcacttctgttcccagggaaaacaacaggagcactttggacctccctgctgcagtcaggagtcatgtggctggaacttgtcctggcttcccttctgggctttgtcatctactggtttgtctcccgggacaaggaggaaaccttaccactaggagatggatggtgggggccagggtcaaagccatcagccaaagaagatgagagcatccggcccttcaaggtggaaacatcagatgaggagatcaaggacttacaccagaggatagataggttccgggcatccccacctttggagggcagccgcttccactatggcttcaactccaactacatgaagaaagtggtgtcctactggaggaacgagtttgactggaggaagcaggtggagatcctcaaccagtaccctcacttcaagaccaagatcgaagggcttgacatccacttcatccatgtgaagcctccccagctgccctcagggcgcaccccaaagcccttgctgatggtgcatggctggcctggatccttctatgagttttacaagatcatcccactactgactgaccccaagtcccacggtctgagtgacgagcacgtgtttgaagtcatctgtccctcgattcctggctatggctactcagaggcatccagcaagaaaggtttaaattcggtggccactgcgaggattttctacaagctgatgacacggctgggcttccagaaattctacattcaaggcggggactgggggtccctcatctgcaccaacatggcccagatggttcccaaccacgtgaaaggcctgcacttaaatatggctttcatttcgagaagtttttacaccatgactcctctcctgggccaacgcttcgggagattccttggctacacagagaaggatatcgagctcttgtacccctataaggagaaggttttctacagcatcatgagggagagtggctacttacacatccaagccaccaagccagacactgtgggctgtgctctcaatgactctcccgtgggcctggctgcctacatcttagagaagttctccacctggaccaagtcagagtaccgtgaactggaggatggaggcctggagaggaagttctccctggatgatctgctggttaacatcatgatctactggacgacaggaaccattgtctcctcccaacgctactacaaggagaatttgggccagggcatcatggtccataaacatgaggggatgaaggtctttgtgcccactggcttttcagccttcccttccgagctactgcatgccccagaaaagtgggtgaaggtcaagtaccccaaactcatctcctattcctacatggaacgtgggggccactttgctgcctttgaagagcccaagcttctggcccaggacatccgcaagttcgtgtccctggctgagctgcagtagtgacactggataccaactgtggctttagcagcagccctggttcctcccaagtcacacttatggaagatgacccctttctgaggaataagtttgttccctgaccacactcgaggacccagacttaaactccacagagtcgtatgttacccccatatgcttcacctcactacatagctgtgttagctacatggctttaatgataaatggatttatttct

SEQ ID NO: 1248 - DNA, 2448 bp, Rattus norvegicus
gaattcctcgctctcctcagaccagctcggcctttaggaccttctgtcactcacaggacacaaggaagagctggtcagagctggtgctgggtgaggtaactgagtacagagggagagcaggatctggctgtgggggaggggagttagggaggggagctcagacttgggctgtgagcaggccttctccactggagaagttcagcccagttcccgctgccactgaacagctctcagtccctccccctcctcgcctgccctcttcccttgtcttctgtatctgtctctctgtctctgtctctgtctctgtctctctgagtgtgtgtgtgtgtgtgtatgtgtgtgtgtgtgtttctgtctgactctcttccttcctcccgctgtcttccctccctttccctgtactctgcccaatctccctggttgcctcttctcatttactccatctccttccctgccctcagcaattaccatgttttgctgggtcaaaataacctatctgaagatgttcagcaccggcttgtcagccaaagcttccgacaccctgactacaaaccattcctcatgaggaaccacacccgaaaacctaaggactacagcaatgacctgatgctgctccacctcagcgagcctgcggacatcacagatggggtgaaggtcatcgatctgcccacgaaggagcccaaggtggggagcacctgccttgtctcaggctggggcagcaccaacccctctgagtgtaagtctgagccaggaaacacagctgcgtgtgagggagaggcagagaggacatggctggggtctgctcaccaccctcttgcctcctggtccacaggggaattccctgatgatctccagtgtgtgaacatccacctactgtctaatgagaagtgcatcaaagcctacaaagaaaaggtgacagatctgatgctgtgtgcaggagagttggaaggaggcaaagacacttgcagggtgagacagcatctccctgcagagaggtgaagggctgagagagggaactgaggttctccattcccacttcctcaccctgtctaagcagatgcttcccgtccttccttatggaagtgatgtgagctgggaggggaggatcctgtatctggtactattagtcctctttgagtggcttcagggactggcctgtccacccctcactccctgtatgacctggacacccacgagctgtgttctctcccctactagcccagggctgcctcttagagtctccctttcttcctcccatgaggtcagttccaggttgtgaagtagaacctgacttccaactccttccttactcctgtccctctccttctttcagggtgactcaggaggccccctcatctgtgatggtgtgctccagggcatcacatcatggggctctgtcccatgcggtgaacccaataagccaggcatctataccaaacttattaagttcacctcctggataaaagaagttatgaagaaaaacccctgagtgtcacactgtaccctgatctcaataaaacccaccatgcagcacacatgttcaagttcctgattctctctcgccttctggaggtcaagctgggcgtccacccactacaggtcaggacttccaaagcagatcagcaagggataggggtccatgtatggttggataaagggatggggttgagaaaaaggcagacaaaaggctcagaccaagtcagggatggcacagggttctcctctggaaaagaacacatgcagatctcaaagtttagaaaagttagacacatctgaaatgtcgattccgtctatggccagaccctacaccagaaacaggagggatgacaggcactcggacactgaatttagattgctggcctggttttattgattcggagaaacaggagggggatgggcatgttacataaattaagccttttcttcctggagagttgtctgtccacagaagggtagggactccccccaaggctaggctacagagtatccccctggacccctggagggtatatctctggtagggctggaccaaagatgaagggaggcttaggggcacctgtgtggggcagagcagtgccagcttgggaaaagggccaccttgctccactgcttgggacacaaaccaatgtgtgctcagaaagacatacacacaggtgagagtactggaggactttcagaggagggtccgactcaggcagtaaagactgggccttaaagtggggagtggggcttgccacctgtgtccccagggtgctacctgctctcaggggaagtatgggacctcaggggaggtctgatggaaactgagccacagggaccgaggtagaggatcaggctgcggggactcatcagtgtcctgagaagttgcgtcgtccctctgttggggaggctccaggtagttcacaaagctgcttgcagtagacagcttctgggtcggctccaaagctt

SEQ ID NO: 1249 - DNA, 418 bp, Rattus norvegicus
  misc_feature (1)..(418): n = a or c or g or t
gccatggnccttcaccttagggttacccatgatagcagaggcagaggacattggctaccatcagttccggtgctctgttgccgaaaccacagatgcgtggtcttctggccaagcgtctgcgggttcatattgttggcgcattcgctgtggccctaggagttgctgctgcctataagtttggcgtggctgaaccaagaaagaaggcttatgcagatttctacaggaattatgactccatgaaagattttgaagagatgaggcaggctggtgtctttcagagtgcgaagtgatttcagaatgcaaagaattctttggattgtgctccatagaagttcactgctgacctgtgttcctgaactatgaaacgtgaatatgtgggctaaggagtagtttctctcaataaacattaattatatgg

SEQ ID NO: 1250 - DNA, 334 bp, Rattus norvegicus
ggcggggtcctggatatcaccattgggctcacttcctgcttcgtgtgttgtcttctacctgcgggctgggtcctgtcacacctggaaagctacaagaagcgggagtgaagggagcgtcttccctcatcctttgactagaccactcttgccagcccaccttgatcatgtttcctgcattcctggctggcttacccygggatcatgttattcaattccagtcacctcttctgcaatcatgacctctcgatgtctccatggtgacaactgggaccacatatattggttctgcttgatggggtccccctttgtaacaataaagtctatttaaaccttg

SEQ ID NO: 1251 - DNA, 801 bp, Rattus norvegicus
gtcggctgtgtcaagatgaagctgaatatctccttccctgccactggctgtcagaaactcatagaagtggatgacgaacgcaagcttcgtacgttctatgagaagcgcatggccacagaagtagctgctgatgctcttggtgaagagtggaagggttatgtggtccggatcagcggtgggaatgacaaacaaggttttcccatgaagcaaggcgttttgacccatggcagagtgcgcctgcttttgagtaaggggcattcttgttatagacctaggagaactggagagaggaagcgcaagtctgtccgaggatgcattgtggatgccaacctgagtgttctcaacttggttattgtaaaaaaaggagagaaggatattccaggactgacagataccactgtgcctcgtcggttgggacctaaaagagctagtagaatccgaaagctttttaatctctccaaagaagatgatgtccgccagtatgttgttagaaagcccttaaacaaagaaggtaagaagcccaggaccaaagcgcccaagattcagcgtcttgttactccccgtgtcctgcaacacaaacgccgacgtattgctctgaagaagcaacgcactaagaaaaacaaggaggaggctgcagaatatgctaaacttttggccaagagaatgaaggaagccaaagagaagcgccaggaacagattgccaagagacgtaggctgtcttcgctgagagcttctacttctaaatctgagtccagtcaaaaataagtctttaaagagtaacaaataaataatgagaccttg

SEQ ID NO: 1252 - DNA, 1819 bp, Rattus norvegicus
actgtgaacagtaaggattttgatttttaagatgcctgggaagtggatttctgctcttctcctgctacagataagttgctgtttccaatctgggaactgtgggaaggtgttggtgtggccgatggaattcagccactggatgaatataaaaacaatactggatgaacttgtacagaggggccatgaagtcactgttctgaaaccttcggcttactatgttcttgatccgaaaaaatcgccagatcttaagtttgaaactttccctacatctgtcagtaaagatgaactggaaaattatttcataaagcttgtggatgtgtggacttatgagttgcaaagagatacatgtttgtcttattctcctttactacaaaatatgatagatggattttctgattactatctaagtctttgtaaagacaccgtttcaaacaagcagctcatggcaaaactacaggaatccaagtttgatgttcttttgtcagatcctgtggctgcctgtggggagctgatagccgaagtgctccacattccttttctgtacagtcttcgcttctctccaggctacaaaattgaaaagtccagtggaagatttatattacctccatcttatgtaccagtaattttgtcaggaatgggtggcccaatgacattcatagacagggtaaaaaatatgatatgtacgctttattttgacttttggttccatatgtttaatgccaagaaatgggatccattttacagtgagattttgggaaggcccaccaccttagctgagacaatgggcaaagcagaaatgtggctcattagatcctactgggatttggaatttccccacccaacattaccaaatgttgactatattggaggactccaatgcagacctcctaaacccttgcccaaggatatggaagattttgtccagagctctggagagcatggcgtggtggtgttttctctggggtcaatggtcagcagcatgacagaagaaaaggccaatgcaattgcatgggcccttgcccagattccacaaaaggttctttggaaatttgatggcaaaaccccagcaaccttaggacccaataccagagtctacaagtggcttccccagaatgacctccttggtcatccaaaaaccaaagcctttgtaactcatagtggagccaatggtgtctatgaggccatctatcatggaatccctatggttggcattcctatgtttggagaacaacatgataacattgcccacatggtggccaaaggagcagctgttacactgaatatcaggacaatgtcaaagtcagatttgttcaatgcactaaaggaaataataaacaatccattctataaaaaaaatgctgtgtggttgtcaaccattcaccatgaccaacctatgaagcccctggacaaggctgtcttctggattgagtttgtcatgcgccacaaaggggccaagcacctgaggccacttggacatgaccttccctggtaccagtaccactctctggatgtgattggattcctgctcacctgttcggcagtcattgcagtccttactgtaaaatgcttcttgtttatttaccgactctttgtgaagaaggaaaagaaaatgaagaatgagtagagctcatttacaatgcactacaggaatgaaatttcagcctcattctaatttatgaatcaccttcttaacacttcctgattatttttttgtcaaggcagatcatctttgtaagaagacatataactccgtaaatactgatatgttatcaaaaattccatcattcataaattttaatagcacttaatataaaaatat

SEQ ID NO: 1253 - DNA, 2460 bp, Rattus norvegicus
agggtaattagacctctgcctggcggtagtagatcccgagatgaaaggggctctggcgtcactggcaggattttatgtccatgaatgcagggaacaaaccagaaacccccccaattctcccctgcgagtgaaagctattatatctgaaaatgacatctttctcaaaacgtttcaccgagcgtcgctcctggacagagccgcaggggggatgaggtatctccagacaggacaagtctctgaagacttcccagcccctaacccagtaccatttaccaagccagcttgcccctagctctcccacctgccactccccagcccctctaaccaccggccctcccgtttttttggggcacagggcatggtgtgaaaggctgagtactgagggggatactatgggtgctgtcccctagggcctgggtggcggggggtgggtggcctgtgggcgtggggggggggcagtgtgcccaccccagtctcttggcgtgctggagggcatcccggatggaattgaagtgaatggaacagaagccaagcaaggtggagtgtgggtcagacccagaggagaacagtgccaggtcaccagatggaaagcgaaaaaggaagaacggccaatgtcccctgaaaagcagcatgtcagggtatatccctagttacctggacaaagacgagcagtgtgtcgtgtgtggggacaaggccaccggttatcactaccgctgtatcacttgtgagtgctgcaagggcttctttcgccgtacaatccagaagaacctccatcccacctattcctgcaaatatgacagctgctgcgtcatcgacaagatcacccggaatcagtgccagttgtgccgcttcaagaagtgcatcgctgtgggcatggccatggacctggttctagacgattcaaagcgggtggccaaacgcaagctgattgagcagaaccgggagaggaggcgaaaggaggagatgatccgctcgctgcagcaacgaccagagcccactcctgaagagtgggatctgatccacgttgctacagaggcccatcgcagcaccaatgcccagggcagccattggaaacagaggcgaaaattcctgccggatgacattggccagtcacctattgtctccatgccggacggagacaaggtagacctagaggccttcagcgagtttaccaagatcatcaccccggccatcacccgcgtggtggactttgccaaaaaactgcccatgttctccgagctgccttgtgaagaccagatcatcctcctgaagggctgctgcatggagatcatgtccctgcgggcagctgtccgctatgaccctgagagcgacaccctgaccctgagtggggagatggcggttaagcgggagcagctcaagaatggtggcttgggtgtagtctccgacgccatctttgaactgggcaagtcactctctgcctttaacctggatgatacggaagtggctctgctgcaggctgtgctgttaatgtcaacagaccgctctggcctgctgtgtgtggacaagatcgagaagagtcaggaggcctacctgctggcgtttgagcactacgtcaaccaccgcaaacacaacattccgcacttctggcccaagctgctgatgaaggagagagaagtgcagagttcgattctgtacaagggggcagcggcagaaggccggccgggcgggtcactgggcgtccacccggaaggacagcagcttctcggaatgcatgttgttcagggtccgcaggtccggcagcttgagcagcagtttggtgaagcgggaagtctccgagggccggttcttcagcaccagagcccgaagagcccgcagcagcgtctcctggagctgctccaccgaagcggaattctccattcccgagcggtctgtggggaagacgacagcagtgaggcaagctccctgagctcctcttcctctgacgaggacacggaggtctgcgaggacctggcaggcaaggcagcctctccctgaggccccttggagggcgatggggaaggagaaggagcatgctactccttctccagggcctctgccctagagctgggcacgcccacatgctgggagcaaggccacaggctggccgcctcccactcaagaccaccctcctacccctgagcacgccacacgtggccaagctcccttgttatttgttctgtagttccctctgcctgggatgcccttccccctctctatgcctggcaataccttgtccctttgaggccccactcaagtgtcacctccttccccagctctcccaggcagaaatagttgtctgtgcttacgtggttcatgcttcttctgtgacacttctcactgttttataattagtcgggcatgagtctgtttcccaagctagactgtgtctgaatcatgtctgtagcccagtgcccagtgccgggcctggcatagagtaggaactccataaaaggtatgttg

SEQ ID NO: 1254 - DNA, 2280 bp, Rattus norvegicus
tgtaaatacagggctgaaagtgggagtggcgctccctcttcctgttatccccttggctcagcctcactgcctgatagaaatgtttctaatatggcacctggtcacagtccattgtagctgaactcccaggtcctgcactgtacaaccctcaccttcccagttcccttaccacctaataaagggcctgcctccggacagcgcccggcccgccgcgcccagctcagcctgctcagccctctggtcccgaggttccgctcagcgctctctcaaactagccgctgcaccatggcagaatcccacctgcagtcatctctgatcacagcctcacagttttttgagatctggcttcatttcgacgctgatggaagtggttacctggaaggaaaggagctgcagaacttgatccaggagcttctgcaggcacgaaagaaggctggattggagctatcacctgagatgaaaacctttgtggatcaatatgggcagagagatgatgggaaaataggaattgtagagttggcccatgtcttacccaccgaagagaatttcctgctgctctttcgatgccagcaactgaagtcctgcgaggaattcatgaagacttggagaaagtatgacactgaccacagtggcttcatagaaacggaggaacttaagaactttcttaaggacctgctagagaaagcaaacaagaccgtggatgatacgaaacttgctgagtacacagacctcatgctgaagctgttcgactcaaataatgatgggaagctggagctgacagagatggccaggttactaccagtgcaggaaaatttccttcttaaattccagggaatcaaaatgtgtgggaaagagttcaataaggcttttgagttatatgatcaggatggcaacggatacatagatgaaaatgagctggatgccttactgaaagacctgtgtgagaaaaacaaacaggaattggatattaacaatatttctacatacaagaagaacataatggccttgtcggatggagggaagctgtaccgaacagatcttgcccttattctctctgctggggacaactagagttggtggccacaaccacttgctagtgatacattgtatctaaaaccataactgtgcgctataaaggagtaggctgtattttcttttatatctgtaaattctactgcatatagagaattatccaggatgtgtggcacattcttttctgcttgtttctatactgtttgtaatgtacagtttttgtaagcatataattgaaaagaagaaagtctatgcttaggccagtcagtataatccattttcaaagatgaatctaacatgattctgctttcataaatacagatgaacacttggatttccctaaaactctaccatctcaacaattctagtgtcagatgtgtaaatgcacagctgtcagtgagtaaaagaataattcatgacaagccaagtgttttttaatttaggcaatcatagaactgtcccacaaagcacttctgtgcgttttccatctagtggaagggatgtgcttctgcttgtgaagcaccaaatgtcaatagttaactatggctttatcataaaacgatctccctagagatttaatttactgatcagtggcatgtctactgcttgaatagataccacactgttggttcaagctggcttggtggcaagggaaggtagccagatgacacataaatctgtctgatactatgcctatatttccaagaagtctattgcagagagtatgaccttagcccattttctaaattattttcatgtgttccagatgacaattattctagtaaactgctgttttgtgtcatattctgtgtgtactctctgattaaattcaatgtacctctgaggcctgtcgcagttgggctccggctcctttgcggagcaccatgtcgcagagggggaggagaccctgcagggcgcctgggtagaactgcacttcagcaatgggaatgggagcagcgttccagcttccgtctctatttataatggtgacatggaaaaaatactgctggatgcgcagatgaatctggacgaagcatctccaagagctctcactgtgacagcccacctcgctcccagacaccacaagataccaacaagagctgaaatagcaccacacgtttggtgagaaaaaacagcatgtgtgtctgaggaagattatattgagagaagaagagaagttgaaagtatcctgaagaaaactcagattggatatgggattggtcaagtcggccagaaaatgttcccccc

SEQ ID NO: 1255 - DNA, 1675 bp, Rattus norvegicus
ggcctctctccgggcctctcgacctcacggtgttgccaaaatgtcgctttctaacaagctgactttggacaagctggacgtgaaggggaagcgggtcgtgatgagggtggacttcaatgttcctatgaagaacaaccagataacgaataaccaaaggatcaaggctgctgtcccaagcatcaaattctgcttggacaatggagccaactcggttgtgcttatgagccacctgggccgtcctgatggtgtgcccatgcccgacaagtactccttagagccagttgctgcagaactcaaatctctgctgggcaaggatgttctgttcttgaaggattgtgtgggctcagaagtagagaatgcctgtgccaacccagcggctgggactgtcatcctcctggagaacctccgctttcatgtagaggaagaagggaagggaaaagatgcttctgggaacaaggttaaagctgagccagctaaaattgatgctttccgagcctccctgtccaaacttggagatgtctatgtcaatgatgcttttgggactgcacacagagcccacagttccatggtgggtgtgaatctgccacagaaggctggtggatttttgatgaagaaggagctgaactactttgccaaggctttggagagtccagagcgacccttcctggctatcttgggaggagctaaagttgcagacaagatccagctgatcaataatatgctagacaaagtcaatgagatgatcatcggtgggggaatggcttttaccttccttaaggtgctcaacaacatggagattggcacatctctgtatgatgaagagggagccaagattgtcaaagatctcatgaccaaagctgagaaaaatggtgtgaagattaccttgcctgttgactttgtcactgctgacaaatttgatgagaatgcaaagactggccaagctactgtggcctctggtatacctgctggctggatgggcttggactgtggtactgagagcagtaagaaatatgctgaggctgtggctcgagctaagcagattgtttggaacggccctgttggggtatttgaatgggaagcatttgccaggggaaccaagtccctcatggatgaggtggtgaaagccacgtctaggggctgcatcactatcataggtggtggagacaccgccacttgctgtgccaaatggaacacagaggataaagtcagccatgtgagcactgggggcggcgccagtttggagctcctggaaggtaaagtccttcctggggtggatgctctcagcaatgtttagtattttcctgccttttggttcctgtgcacagcccctaagtcgacttagtgttttccgcatctccatttggtgttagtgcagctagtggccaagacgagcaccaggaacctaagcagcagctgcacagcatctcagctcgtctttactgcatgggattcattatagttaagtccatttaatttcttagtgactaaaccttgcattaaggcatatatttatactctgcctgtgaaaggaagtgagctgtaaaagcttagctctcttcgctgtatgtagcctctggttagcctgtcactgttcatgacagcatggaaataacgatgaggattccagctgtaggtttgggaggttgatgatattgaaccaataaaagatcccact

SEQ ID NO: 1256 - DNA, 1341 bp, Rattus norvegicus
ccagcaatttcatctcctagacctcatcagactctgacccagttcttgaatgactttggagacccagatgtttcagaatgcacattctggaagccaatggctactcccaccactgacaatgttgctgctgtttgcttttgcagacaggcagacgggagatcttctgaaggctgtggtgaaacgtgatcccccatggatccaggtgctcaaggacgacactgtgacgctgacgtgcgaagggacccacaatcctggaaactcttctacccagtggttccacaaccagagctccacctggggccaggtccaagccagctacacgtttaaggccacagtcaatgacagtggagaataccggtgccgaatggcgcacaccagcctcagcgaccccatacatctggaagtgatttctgactggctgctgctccagacccctcaactggtgtttgaggaaggggaaaccatcacattaaggtgccatagctggaagaacaaacagctgactaaggtcttgttgttccagaatggaaaacctgtgaggtattattatcaaagcagcaatttttcaatccccaaagccaaccacagtcacagtgggaactactactgcaaagcatatctaggaaggacaatgcatgtgtccaagcctgtcaccatcactgtccaaggttcagcaaccgcgtccaccagctctctagtgtggttccatgccgctttctgcctagtgatgtgcctcctgtttgcagtggacaccggcctgtatttctgtgtacggagaaatcttcaaacctcgggggaggactggaggaaatccctgtcagtcggaaagtacaaggctccacaggacaaatgacatcccatcgtatggctaaacagcggcagcttcttttcagccacaccgccgcttcatctacagccttcctttgaaagcaacttaccaccaggctggatatttggtcctgcaatcacaactgctaggaggctgaggcaggaggatcaccaaaggctgcccgggttttagagaagagagagtgcaagtctatcctggataacccaataagaccctgggtttagatggcttatcaggaaagagcacccattgctaagctcacagacaagaccacagattgatccctaaggacacagggcaaagggggagaacaaattcctgaaagttgtcctctgacctccacacgtccaccatggcagatgcacacaataaacaaattaaaatgtaatatatatattttaaacaagaggtggggaaaggctgggggttggtggcacagtttttatccaggacacatgatgctctggattttgacctcctataataaaacg

SEQ ID NO: 1257 - DNA, 247 bp, Rattus norvegicus
ttgtccactccagatacacttcaccatcttgtccttctctctctccaacagaagggtgatacagaatggcgtggtccaggctgatgctggcagcttgcctccttgtgatcccctctgaggttgcagcggactgcctgtccttgtgttccctgtgtgcagtgaggacgcaggatgggccccatcccatcaaccccctggtaggtttcagcaagacttctccatgttattctatttctgagtggagccc

SEQ ID NO: 1258 - DNA, 1994 bp, Rattus norvegicus
atctctcccaggggctgtggactgctggctttctgttgataccttagagatgcagcggcttttggctccagcaaggcgggtcctgcaagtgaagagagtcatgcaggaatcttcgctctcacccgctcacctgctccccgcagcccagcagaggttttctacaatccctcctgctcccctggccaaaactgatacatggccaaaagatgtgggcatccttgccctggaggtctactttccagcccaatatgtggaccaaactgacctggagaagttcaacaatgtggaagcagggaagtacacagtgggcttgggccagacccgtatgggcttctgttcggtccaggaggacatcaactccttgtgcctcacagtggtgcagaggctgatggaacgcacaaagctgccatgggatgccgtaggccgcctggaagtgggcacggaaaccatcattgacaagtccaaggctgtcaagacagtgctcatggagctcttccaggattcaggcaacactgacatcgagggcatagataccaccaacgcctgctatggtggcactgcctccctcttcaacgctgccaactggatggagtccagctactgggatggtcgctatgccctggtggtctgtggtgatatcgcagtctacccaagtggtaacccccgccccacaggtggtgccggggctgtggcaatgctgattgggcccaaggccccgctagtcctggaacaagggctgaggggaacccacatggagaacgcctatgacttctacaaaccaaacttggcctcagagtatccactggtggatgggaagctgtctatccagtgctacctgcgggccttggaccgatgctatgcagcttaccgcaggaaaatccagaatcagtggaagcaagctggaaacaaccagcctttcaccctcgatgacgtgcaatatatgatcttccacacacccttttgcaagatggtccagaaatccctagctcggctgatgttcaatgacttcctgtcatctagcagtgacaagcagaacaacttatacaagggtctagaggccttcaagggtctaaagctggaagaaacctacaccaacaaggatgttgacaaggctctgctgaaggcctccctggacatgttcaacaagaaaaccaaggcctccctttacctctccacaaacaatgggaacatgtacacctcgtccctctacgggtgcctggcctcacttctctcccaccactctgcccaagaattggccggctccaggattggagccttctcctacggctcaggcttagcagcaagtttcttctcatttcgagtgtccaaggacgcttccccaggttcccctctggagaagctggtgtctagtgtgtcagatctgcccaaacgtctagactcccggagacgcatgtcccctgaggaattcacagaaataatgaatcagagagagcaattttaccacaaggtgaacttctctccccctggtgacacaagcaacctcttcccaggcacttggtaccttgaacgagtggatgagatgcaccgcagaaaatatgcccggcgtcccgtctaaggagaccaatccatacaaccattccccggggaaagaatgtgagcagagccgttacccaaacggcttccacttaaaattccacccacagcagtgaacggtgaatagacacagcgaccccataggatctgctccgcggtgaagggcctccctctgtggatcctgggtgaccctccctgaagcagtgagcaccacaggttctgctgtggaccagagcccccctgtggagagggagaaagaaaggggagccgctgacctgcagggatacagaccttccccacagcctggcagccgcccgtttgttgcagcttattatcagactgtgggctatcatagttcatgctcgtttcttaaagtttcccgagaatttctaaaattttgtatctaaacttttaatatggcgattaaaaggagagaagga

SEQ ID NO: 1259 - DNA, 1858 bp, Rattus norvegicus
agaaaggaacacagtgtgaacagaaggattttgattttcaaaatgccaggaaaatggatttttgctctgctcttgctgcagataagtttctgcctcagatctgcgaaatgtgggaaggtgttggtgtggccgatggaattcagtcactggatgaatataaaaacaatactggatgaacttgtacagaggggccatgaagtcactgttctgaaaccttcagcttactatgttcttgatccaaaaaaatcgccagaccttaagtttgaaacttttcctacatctgtcagtaaagatgaactggaaaaatatttcataaaacttgctgatgcgtggacttatgagttgcaaagagatacatgtttgtctttttctcctttactacaaaatatgatggatgaattttctgattattatctaagtgtttgtaaagacgccgtttcaaacaagcagctcatggcaaaactacaggaatccaagtttgatgttcttttgtcagatcctgtggctgcctgtggggagctgatagccgaagtgctccacattccttttctgtacagtcttcgtgcctctccaggccataaaattgaaaagtccagtggaagatttatactacctccctcttatgtgcctgtaattttgtcaggattgggtggccaaatgacattcatagacagggttaaaaatatgatatgtatgctttattttgacttttggttccatatgtttaatgccaagaattgggatccattttatactgagattttgggaaggcccaccaccttagctgagacaatgggcaaagcagaaatgtggctcattagatcctactgggatttggagtttccccacccaacattaccaaatgttgactacattggaggactccaatgcaaacctgctaaacccttgcccaaggatatagaagactttgtccagagctctggagagcatggtgtggtggtgttttctctggggtcaatggtcagcagcatgacagaagaaaaggccaacgcaattgcatgggcccttgcccagattccacaaaaggttctttggaaatttgatggcaaaatcccagcaactttaggacccaataccagagtctacaagtggcttccccagaatgacctccttggtcatccaaaaaccaaagcctttgtaactcatggtggagccaatggtgtctatgaggccatctatcatggaatccctatgattggcattcctatgtttggagaacaacatgataacattgcccacatggtggccaaaggagcagctgttacactgaatatcaggacaatgtcaaagtcagatttgttcaatgcacttaaggaagtaataaacaatcctttctataaaaaaaatgctatgtggctgtcaaccattcaccatgaccaacctatgaaacccctggacaaggctatcttctggattgagtatgtcatgcgccacaaaagagccaagcacctgagaccacttggacataaccttccctggtaccagtaccactctctggatgtgattggattcctgctagcctgtttggcagtcattgcagcccttgctgtaaaatgcttcttgttcatttaccgattctttgcaaagaagcaaaagaaaatgaagaatgagtagagctcgttgacaatgcactacaggaatgaaatttaagcctcattctaatttatgaatcactttcttaacacttcctgatttttttttgtggaggcagatcatcattgtaagaagacatatagctctgtgaatattgatatgttatcaaaattttaaaatcacttaatgtaaaaaagttgcattgtagaaaaattgaggaaaataaagtttacttgatagtctt

SEQ ID NO: 1260 - DNA, 2127 bp, Rattus norvegicus
ttgggagaagtcatgcatacatggaggcggctggcagcctctttgactccagagttcagcgggagacagagggagctcatcacatcaggcaccccagaagagttctgggcctgcttcacgtttaactttatgattttcaggagtaccagcctgctctaacggtttcagggaagattggctgtgggtttccgcagagtgtgggggagttcctgcttatccatacagctgattttcaagaaccacctccccaagaaaggtttgggggctcctactggacgagccatgaagaatcggtttctggtgctgggcctggtggcggtggttctggtgttcgtcatcatcggcctctgcatctggctacccaccacctctgggaagcctgaccatgtgtactccaaggcggccgtggccacagatgccaagcgttgctcagagattgggcgggatatgctacaggaaggcggctccgtagtggacgcggccatcgcaagcctgctgtgtatggggctcattaatgcccacagtatgggcatcgggggcggcctcttcttcaccatctacaacagcaccacacgaaaagctgaagttatcaatgcccgtgaaatggctcccaagttggccaataccagcatgttcaataattctaaggactctgaagaaggaggcctttcagtggcagttcctggtgaaatccgtggctatgagctggcacaccaacggcatggccggctaccctgggctcgcctcttccaacccagcatccaactggctcgccatggcttccctgtgggcaagggcttggcaagagccttggacaaaaaacgggacatcattgagaagacacctgctttgtgcgaggtgttctgccggcaagggaaggtgcttcaggaaggagagacagtaactatgccgaagttggccgatacgttgcaaatactggcccaggaaggggccagggccttctacaatgggagcctcacagcccagattgtgaaagacatccaggaggctgggggcattatgacggttgaggaccttaacaactatcgtgcggaagtgatcgagcatccgatgagcatcggcctcggggactccaccctgtacgtgcccagcgccccactcagcgggcccgtgctgattctcatcttgaacatcctcaaaggatacaacttctctccaaagagcgtggcaaccccagaacagaaggcgctgacgtatcaccgtatcgtggaggcctttcggtttgcctatgccaagaggaccatgctcggtgacccaaagtttgtcgatgtgtctcaggtcatccgcaacatgagttctgagttctacgctactcagcttcgagcccgcatcactgatgaaaccactcacccaaccgcctactatgaggctgaattctaccttccagacgatgggggtaccgctcacctgtccgtggtttccgaggatggcagtgctgtggccgccaccagtaccatcaacctctactttggctccaaggtcctctctcgggtcagtggcatcctgtttaatgacgagatggatgacttcagctcgcccaacttcaccaaccagtttggggtagcgccctcaccagccaacttcatcaagctaggtaagcaaccgctttcatccatgtgcccctcaatcatcgtggataaggacggcaaggttcggatggtggttggagcctcgggaggtacccagatcaccacgtctgttgcactggccatcatcaacagcctgtggttcgggtatgatgtgaagagagctgtggaggagccccgtcttcacaaccagcttttgcccaataccacaacagtagagaaaaatattgatcaggtggtgactgcaggtctgaagactcggcaccaccatacagaggtcacacccgacttcatcgctgtggttcaggccgtcgttcgaacgtcaggtggttgggcagctgcctcagattccagaaaaggcggggagcccgctggctactgagtgcccggaaggggcaagactgacctgcagccaagagacgagagtgggactctggagaacatgctgcccctgggtgggagagagcaggataataaacagaggccgccgccaagttgcgggaagcctttgcaggctgga

SEQ ID NO: 1261 - DNA, 4127 bp, Rattus norvegicus
agccgctgctggggaggttggggctgaggtggtggcgggcgacgggcctcgagacgcggagcgacgcggcctagcgcggcggacggccgagggaactcgggcagtcgtcccgtcccgccatggaaatggagaaggaattcgagcagatcgataaggctgggaactgggcggctatttaccaggatattcgacatgaagccagtgacttcccatgcagaatagcgaaacttcctaagaacaaaaaccggaacaggtaccgagatgtcagcccttttgaccacagtcggattaaattgcatcaggaagataatgactatatcaatgccagcttgataaaaatggaggaagcccagaggagctatatcctcacccagggccctttaccaaacacgtgcgggcacttctgggagatggtgtgggagcagaagagcaggggcgtggtcatgctcaaccgcatcatggagaaaggctcgttaaaatgtgcccagtattggccacagaaagaagaaaaagagatggtcttcgatgacaccaatttgaagctgacactgatctctgaagatgtcaagtcatattacacagtacggcagttggagttggagaacctggctacccaggaggctcgagagatcctgcatttccactacaccacctggcctgactttggagtccctgagtcacctgcctctttcctcaatttcctattcaaagtccgagagtcaggctcactcagcccagagcacggccccattgtggtccactgcagtgctggcattggcaggtcagggaccttctgcctggctgacacctgcctcttactgatggacaagaggaaagacccgtcctctgtggacatcaagaaagtgctgttggagatgcgcaggttccgcatggggctcatccagacggccgaccaactgcgcttctcctacctggctgtgatcgagggtgcaaagttcatcatgggcgactcgtcagtgcaggatcagtggaaggagctttcccatgaagacctggagcctccccctgagcacgtgcccccacctccccggccacccaaacgcacattggagcctcacaatggcaagtgcaaggagctcttctccaaccaccagtgggtgagcgaggagagctgtgaggatgaggacatcctggccagagaggaaagcagagccccctcaattgctgtgcacagcatgagcagtatgagtcaagacactgaagttaggaaacggatggtgggtggaggtcttcaaagtgctcaggcatctgtccccactgaggaagagctgtccccaaccgaggaggaacaaaaggcacacaggccagttcactggaagcccttcctggtcaacgtgtgcatggccacggccctggcgactggcgcgtacctctgttaccgggtatgttttcactgacagactgctgtgaggcatgagcgtggtgggcgctgccactgcccaggttaggatttggtctgcggcgtctaacctggtgtagaagaaacaacagcttacaagcctgtggtggaactggaagggccagccccaggaggggcatctgtgcactgggctttgaaggagcccctggtcccaagaacagagtctaatctcagggccttaacctgttcaggagaagtagaggaaatgccaaatactcttcttgctctcacctcactcctcccctttctctggttcgtttgtttttggaaaaaaaaaaaaaagaattacaacacattgttgtttttaacatttataaaggcaggtttttgttatttttagagaaaacaaaagatgctaggcactggtgagattctcttgtgccctttggcatgtgatcagattcacgatttacgtttatttccgggggagggtcccacctgtcaggactgtaaagttcctgctggcttggtcagcccccccacccccccaccccgagcttgcaggtgccctgctgtgaggagagcagcagcagaggctgcccctggacagaagcccagctctgcttccctcaggtgtccctgcgtttccatcctccttctttgtgaccgccatcttgcagatgacccagtcctcagcaccccacccctgcagatgggtttctccgagggcctgcctcagggtcatcagaggttggctgccagcttagagctggggcttccatttgattggaaagtcattactattctatgtagaagccactccactgaggtgtaaagcaagactcataaaggaggagccttggtgtcatggaagtcactccgcgcgcaggacctgtaacaacctctgaaacactcagtcctgctgcagtgacgtccttgaaggcatcagacagatgatttgcagactgccaagacttgtcctgagccgtgatttttagagtctggactcatgaaacaccgccgagcgcttactgtgcagcctctgatgctggttggctgaggctgcggggaggtggacactgtgggtgcatccagtgcagttgcttttgtgcagttgggtccagcagcacagcccgcactccagcctcagctgcaggccacagtggccatggaggccgccagagcgagctggggtggatgcttgttcacttggagcagccttcccaggacgtgcagctcccttcctgctttgtccttctgcttccttccctggagtagcaagcccacgagcaatcgtgaggggtgtgagggagctgcagaggcatcagagtggcctgcagcggcgtgaggccccttcccctccgacacccccctccagaggagccgctccactgttatttattcactttgcccacagacacccctgagtgagcacaccctgaaactgaccgtgtaaggtgtcagcctgcacccaggaccgtcaggtgcagcaccgggtcagtcctagggttgaggtaggactgacacagccactgtgtggctggtgctggggcaggggcaggagctgagggtcttagaagcaatcttcaggaacagacaacagtggtgacatgtaaagtccctgtggctactgatgacatgtgtaggatgaaggctggcctttctcccatgactttctagatcccgttccccgtctgctttccctgtgagttagaaaacacacaggctcctgtcctggtggtgccgtgtgcttgacatgggaaacttagatgcctgctcactggcgggcacctcggcatcgccaccactcagagtgagagcagtgctgtccagtgccgaggccgcctgactcccggcaggactcttcaggctctggcctgccccagcacaccccgctggatctcagacattccacacccacacctcattccctggacacttgggcaagcaggcccgcccttccacctctggggtcagcccctccattccgagttcacactgctctggagcaggccaggaccggaagcaaggcagctggtgaggagcaccctcctgggaacagtgtaggtgacagtcctgagagtcagcttgctagcgctgctggcaccagtcaccttgctcagaagtgtgtggctcttgaggctgaagagactgatgatggtgctcatgactcttctgtgaggggaacttgaccttcacattgggtggctttttttaaaataagcgaaggcagctggaactccagtctgcctcttgccagcacttcacattttgcctttcacccagagaagccagcacagagccactggggaaggcgatggccttgcctgcacaggctgaggagatggctcagccggcgtccaggctgtgtctggagcagggggtgcacagcagcctcacaggtgggggcctcagagcaggcgctgccctgtcccctgccccgctggaggcagcaaagctgctgcatgccttaagtcaatacttactcagcagggcgctctcgttctctctctctctctctctctctctctctctctctctctctctctctctaaatggccatagaataaaccattttacaaaaataaaagccaacaacaaagtgctctggaatagcacctttgcaggagcggggggtgtctcagggtcttctgtgacctcaccgaactgtccgactgcaccgtttccaacttgtgtctcactaatgggtctgcattagttgcaacaataaatgtttttaaagaac

SEQ ID NO: 1262 - DNA, 1113 bp, Rattus norvegicus
cataagatgtatgtgtagggggtgtaagagtactcgtgaggggtgtgggcagtgttatagggtgctggtgagcaaaccctctgggacctaggtggccttccagggaagatgaagctcctcttgctcctgctgagcttctctctggcccccaagacagaggcaggggagatcatcgggggacatgaagccaagccccactctcgaccctacatggcctatcttcagatcatggatgagtattctgggagtaagaagtgtggcggcttccttatacgagaagactttgtgctgactgctgctcactgttcgggaagcaaaataaatgtcacgttgggggcccacaacatcaaagaacaggagaagatgcaacaaatcatccctgtggtgaaaatcattccccacccagcgtataattctaagacaatctccaatgacatcatgctgttaaagctgaagagtaaggccaagaggtctagcgctgtgaagcctctcaatctgcccagacgcaacgtcaaagtgaaaccaggagatgtgtgctatgtggctggttggggaaagctgggcccaatgggcaaatactcagacacactacaagaggttgagctaacagtacaggaggatcagaagtgtgagtcctacttaaaaaattatttcgacaaagccaatgagatatgtgcaggggacccaaagatcaaacgtgcttcctttcggggggactctggagggcctcttgtgtgtaaaaaagtggccgcgggcatcgtctcctatggacaaaatgatggttcaactccacgggcattcaccaaagtctcgactttcctatcatggataaagaaaactatgaaaaagagctaactacaagaagcaacatggatcatttcctgactaaccatctgccctatagctgagtccaggattgctctaggacagatggcagcaactgaataaagcactttttttctgagactggttgactggtttcatgtccattcacagtgatcaaccctgtccttggcagatgaatggaatgcttctgccacaaggctgtgacaacccagctgacatctgctagttcaccctctctacaagagaagaagaatgtttgattgtccg

SEQ ID NO: 1263 - DNA, 2078 bp, Rattus norvegicus
ctcgacgaaggagtaggacgagctctcactgtctgagccaaaccgaaccgggccgagctgagccgaggtcagcggtggccagaggaacccagcatctcgggcatcattcgctccgtgcacgcatcgtgtacctacaccgcaactccgtgcctcattcccgggtaccctctgtgactcgctcctgcagcaaagccaccatgcctatcactcggatgcgaatgagaccctggctagagatgcagattaattccaaccaaattccagggctgagctggatcaataaagaagagatgatcttccagatcccatggaagcatgctgccttgcacggttgggatatcaacaaggatgcctgtctgttccggagctgggccattcacacaggccgatacaaagctggggaaaaagagccagatcccaagacttggaaggcaaacttccggtgtgccatgaactccctaccagacatcgaggaagtgaaggaccagagcaggaacaagggcagctctgctgtacgcgtgtaccggatgctgccacccctcaccaagaaccagaggaaagagagaaagtccaagtccagccgtgacactaagagcaaaaccaagaggaagctgtgcggagattctagccctgacaccttatctgacggactgagcagctctactctgcctgatgaccacagcagttacacagctcagggatacctgggtcaggacttggacatggacagggacattaccccagctctgtcaccgtgcgtcgtcagcagcagtctctctgagtggcatatgcagatggacatcatgccagacagcaccactgatctgtacaacttgcaggtgtcgcccatgccctccacctctgaagctgcaacagatgaggatgaggaagggaagttacctgaggacatcatgaagctctttgaacagtctgagtggcagccgacgcacgtggatggcaagggatacttgctcaatgaaccaggagcccaactctctactgtctatggagacttcagctgcaaggaggaaccagagatcgacagccctggaggggacatcgagataggcatacagcgtgtcttcacagagatgaagaatatggaccccgtcatgtggatggacaccctgctgggcaactctaccaggccgccctccattcaggctattccttgtgcaccataatttgggtccctgacccgttcttgccctcctgagtgagctaggtccagcatcatggtggctgtgatacaacataaagctaaacttccgtggaccccttgatgtggcaaaacataatcccattgccaagcagggaagggaccaaaccatcctccttgggtcagtggactgactcttcagagcttaggaggcagggtctaagtttttcaagctggtcctgactcctaggaagatggattggcgttctgaggttagtgtgaggcagaggacctggacggaagttaccttctagctctttgaaagcttcattgcttagagagggtctcaccactgggctggcctgggggatagaccagcgcccacagaagagcattgcactggccttagggctggctccacactgggagacaattgcactaagtcctattcccaaagaactgctgcccttcccaaccgagccctgggatggttctagagccagtgaaatgtgaaggaaaaaatggggtcctgtgagggttgtctcccttagcctcagagggattctgcctcactccctgctccagctgtggggctcaggaaaaaaaaatggcactttctctgtggactttgccacatttctgatcagaagtgtacactaacatttctcccaagtcttggcctttgcatttatttatatagtgccttgccctgtgcctgctgtctctcctcaggcctcagcagtcctcagcaggcccagggagggggttgtgagcgccttggcgtgactctgaacattggaaacgccacctaactactaagttgtgtctgatctcgtgtggatctgtgtaaatatgtatattcatctttttataaaaacctaagttgtttaaaaaaaaaaaaaaaaaaaaaaaaaaaaaa

SEQ ID NO: 1264 - DNA, 2338 bp, Rattus norvegicus
tctacaaccatgaaggtagcaattatctttcttctcagtgctttggccctgctcagtttagcaggtaaccctccagctgaggtgaatggaaaaacgcctaattgccctaagcaaattatgggatgtcccaggatttatgaccctgtgtgtgggactaacggaattacttaccccagtgaatgcagtctgtgctttgaaaacaggaaattcggaacatctatccacattcagaggagagggacttgctgaatgtcctgattttgaaatcttttagggctaccataatgtttagcaagaaggtttgctgaataaatgcatctgaacatattttgttcttcccaaagcttttgctcaaaggcatatatgagtatattgagaatagggatctgagaagaaaaccagagtagagcaagctttaccacttagttcttcatgctcatacttcaaaaattgcagatgatgacaacacatagttgagcatgaacatgtgtaatgaatagagtttgggttaggatgaagaaggtagcctatctgtgcacaagaaagaagtagactgacttggatctttcttaggggagtttaccaaaggaaagactgccttgtatatctacagtgtttcacttgtgagacaccacaactctgcagatttactcttgttctgtgaggaaacttagaagagtcaaattgtttgactaatagtccaacatacatgatgccagggtgttcttttagatcaagctgacctcttccttcatccatatgagcactccttcttttaaccacaatcttctcttgtggatcatgccttgactttcttcaatgggaatcctagataatattccctactgtaagatcttgcatgtctatattcagtgatagaatatagacgtgatataataggatataaccaaatgaattagaaacaaggaaatattctcaaaagggaaagtatcaacaactacttttaaaaaaggaatcattttaagatcctgagtttctaaagaaaatcttagtctaagatggaaagagagtaaagagctaacacaggtgagtctgggcaaggaaccctagtacagtggggttgggtcagcacctttgccagaaataaccaagctattcagaaatacactaggaaaggagagttgcctagtaacccacttctggtcatattcagtattcatgccttgaactgaactcttgctcctagaggatgctataactaacaaaccgagcaacttaaacagcctgacagctctcaccaaataccttgctatctcaagttatggatgcaagatggctcccagtgtctatctgtgattctagaggacacttgaagggcaccaacacttaacaaattctgtgggggtaaatttattttaatcactggatgctggaagacacacacagagacacaaacacacaaagagagacagagagagagaaagagagagagagaggtagagagagagagagagagagagagggagagagagggagagagagagtgttttgggttttgttgttgttgttgttgttgatttggaattatatcaagatataagataatctcaaatgtatctttagtagttctgctccctggacccatgagaagacaggaatgaggattctgtgcatgtggtacttacatttcaaaaggagtatctaataaactggaaactgcttaaaagaatgagactatcagcactgataagaatataaagcttcaagctatgaagagtgattcaaagaaggaaaagaattccctcagaactgggaggaccttttaaaaaattctgagtccccgtttctaaagtttcaccttcctaacttcatgtattttttaatagctcaaagagtccaattactgctgctcatatactcatgagtgtgacaccatgcactgttactgccaatatatgaaaggccatacccctaaagaaaattgacttaagaactccttgtttagggttgggtacttctgtgaccctcccacattcatgctggaatgttgactggcttcatttttataaggcaaaagatcttcccactctcttctgagagagaataaatcagttttgctcaatggagtgattctgagtatactaatcacgatcccaggacaggccccattctcacaagcagttagctaacacaaatagaactccatattttatagcagtttttatcttttgttcttggttttagttcttattttcaagacagagaaaaacacatgaagttggaagggtagaagtgggggggggcgtgggtctgggaggagttgggggatagagaaaaatataataaaaatatatgaaattctcgagaatgaataaat

SEQ ID NO: 1265 - DNA, 511 bp, Rattus norvegicus
  misc_feature (1)..(511): n = a or c or g or t
cctgaacttggttccttttatgacagccgctttggttcactcacaaagaacttcaaagaatttggcagtaagacctctgattctgacatcttcacagacatcgagaaccctagctcccatgtacctgagttttcttncagtagtaaaacctcaactgtcaggaaacaagtaaccaagagctataaaatggcagatgaggcagcaagtgaagctcaccaagaaggagacactcgaaccaccaagaggggccgagctcgcacaatgagaggtatccacgcttaactctgggaagttgccctgaccccctagactaagttaaccatttctgcaaagtgcttaccaggcgcgctctttcttaacctcttctagtgctttggtggaatctcattttttttcatgctagactgtacgttccttgggggcagggactttgccatgtgtctatttctctaattccccaatgcataacagtgcagtcatttctcaataaatatattttaaataaatgaac

SEQ ID NO: 1266 - DNA, 1157 bp, Rattus norvegicus
ggcaggctaggttgcgctgtctgcgtgctgaccggggcttcccggggcttcggccgcgccctggccccgcagctggccgggttgctgtcgcccggttcggtgttgcttctaagcgcacgcagtgactcgatgctgcggcaactgaaggaggagctctgtacgcagcagccgggcctgcaagtggtgctggcagccgccgatttgggcaccgagtccggcgtgcaacagttgctgagcgcggtgcgcgagctccctaggcccgagaggctgcagcgcctcctgctcatcaacaatgcaggcactcttggggatgtttccaaaggcttcctgaacatcaatgacctagctgaggtgaacaactactgggccctgaacctaacctccatgctctgcttgaccaccggcaccttgaatgccttctccaatagccctggcctgagcaagactgtagttaacatctcatctctgtgtgccctgcagcctttcaagggctggggactctactgtgcagggaaggctgcccgagacatgttataccaggtcctggctgttgaggaacccagtgtgagggtgctgagctatgccccaggtcccctggacaccaacatgcagcagttggcccgggaaacctccatggacccagagttgaggagcagactgcagaagttgaattctgagggggagctggtggactgtgggacttcagcccagaaactgctgagcttgctgcaaagggacaccttccaatctggagcccacgtggacttctatgacatttaagcccatgtcctgtcacagcgccccccccccccagccctgcctaacacacatacaagccctccaacccagccagcgggagccacgggcactgccagtcctgagaaggcttctgcagaggctcgggagagagctgatgtgtactggagtcctctgtccccaggaagagaacttagggctgggagagcaggagaagcagaaacactgagcagatgaggcagagtctctcgtctgtggtcgttctcaggtgaagagggcggggtctgattcacagagaggaccgagggtattgaatctttgttgtactgccttcatcctggggtattcactggtcctccctcgactctggtcaaatacatggttatggcagatgccctaga

SEQ ID NO: 1267 - DNA, 811 bp, Rattus norvegicus
gccttttctctgccttgcttgcttgagctccagcacagtccgagatggctggcggtaaggctggaaaggactccggaaaggccaagacaaaggcggtttcccgctcccagcgagcgggcttgcagttccctgtgggccgtattcatcgacacctgaaatctaggacaacaagccacggacgtgtgggcgcgaccgcagctgtgtacagcgcagccatcctggagtacctcaccgcagaggtacttgagttggcaggaaatgcatcaaaagacttgaaggtaaagcgtattacccctcgtcacttgcaacttgctatccgcggagatgaagagttggactctctgatcaaggctacgattgctggtggtggtgtcatcccacacatccacaaatcactgattgggaagaaaggacaacagaagactgtctaaggatgcctggattccttgttatctcaggactctaaatactcttaacagctgtccagtgttggtgattccagtggactgtatctctgtgaaaaacacaattttgcctttttgtaattctatttgagcaagttggaagtttaattagctttccaaccaaccaaatttctgcattcgagtcttaaccatatttaagtgttactgtggcttcaaagaagctattgaatctgaagtggtgggttttgattgagttgactgtttttaaaaaactgtttggattttaattgtgatgcagaagttatagtaacaaacatttggttttgtacagacattatttccactctggtggataagctcaataaaggtcagatcccaaactaaaa

SEQ ID NO: 1268 - DNA, 1957 bp, Rattus norvegicus
gggcatgagtggctcggctctgagcttcaccatattcccaggaagtatccttgggttcctccaaatagccactgtgctcactgtgctcctgctgctcctcaagacagcccagttctacctgcacaggcgatggttactcagagctacccagcagttcccatccccaccttctcactggttctttgggcataagatcccaaaggaccaggattttcaagatattctaacacgggtaaagaatttcccaagtgcctgtccacagtggctctgggggagcaatgtgcgaatccaagtgtatgaccctgaatacatgaagctgattctggggagatcagacccaaaagctcatggttcctacagatttctagctccctggattgggtatggtttgcttctgctgaatggacagacatggttccagcaccgacgaatgttgactccagctttccactatgacactctgaaaccttatgtgggcatcatggcagactctgttcgcataatgctggataaatgggaacagattgttggacaggattccaccctggagatcttccaacacatcaccttgatgaccttggacaccatcatgaagtgtgccttcagccaagagggcagtgtccagttggacagaaaatacaagtcctacatcaaggcagttgaggacctgaacaatctcttttttttccgtgtacagaacatgtttcatcagaatgacttcatctatagtctgtcctctaatggccgcaaggcccacaatgcctggcaacttgcccatgattacacagaccaagtgatcaaatcaaggaaggctcaacttcaggacgaggaagagttgcaaaaggttaagcagaaaagacgattggatttcctggacatccttctgtttgccagaatagaaaatggaagcagcttatctgataaggacctgcgtgctgaagtggataccttcatgttcgagggccatgacaccacagctagcggtatctcttggatcttctatgctttggccacaaatcctgaacaccagcagggatgcaggaaggagatccagagtctcctaggagatggagcttctatcacctgggacgacctggacaagatgccctacaccaccatgtgcatcaaggaagctctgaggatctacccacctgtaacagctgtgagcagaatgctcagcacacctgtcaccttcccggatggacgctctttacccaaaggtatcacagtcatgctctccttctatggccttcatcacaacccaactgtgtggccaaatccagaggtgtttgacccttatcgatttgcaccagagtcttcccgacacagccactcattcctgcccttctcaggaggagcaaggaactgcattgggaaacagtttgccatgaatgaactgaaggtggccgtggccctgaccctgctccgctttgagctgctgccagatcccaccaggatcccaatccccataccaagactcgtgttgaagtccaagaatgggatctacctgcgtctcaaaaagctccaataatcttgacagcacaagacagctccaacagcatgctgtctgccatttgtctttctgtcagtcactcttgtccccactccatctgctcacatctcattctttcttctcaccttgttcacctccacccaccttctgctgtgcttctggtctccttgtctgtcagtctttctatctcgacttctggaatttctacctgcttttctctctacctggcccctacctgacttcatgtttgaccttgaccttaatgatctccctaaattacaccctgccttctcttctgcatatttccttctattctactgtttgtctgtgcttaaattgagctttataccaatgtcataattgattacaatagaagtattgccctatgattcgatataccaggtgtttttcatgatttcattagaataaagctcaggtcattgc

SEQ ID NO: 1269 - DNA, 1360 bp, Rattus norvegicus
aattcgggcgctgcccctgctgtgcgctggggcctggctgctgagtgctggggccaccgctgagctgaccgtgaatgccatagaaaagtttcactttacgtcatggatgaaacagcatcaaaagacgtacagctcgagggagtacagccacaggctcaggtgtttgccaacaactggaggaagattcaagcccacaaccagaggaaccacacatttaaaatgggattgaaccagttttcagatatgagctttgccgaaataaaacacaaatacctctggtcagagcctcagaattgctcagccaccaaaagtaactacctccgtggtactggcccctacccatcctccatggactggaggaagaaaggaaatgtcgtttcaccagtgaagaaccagggggcctgtggcagctgctggactttctcaaccactggggccctagagtcagctgttgctattgccagtgggaaaatgatgaccttggctgagcagcagctcgtggattgtgcccagaacttcaacaatcatggctgccaaggaggtctccccagccaggccttcgagtacatcctgtacaacaagggcatcatgggagaggacagctacccttacataggcaagaatggtcagtgcaaattcaacccagaaaaggccgtcgcgttcgtcaagaatgttgtcaacatcacactcaatgatgaggctgcaatggtagaggctgtggccctatacaatcctgtgagctttgcctttgaggtgactgaagattttatgatgtataaaagtggtgtctactccagtaactcctgtcataaaactccagataaagtaaaccatgcagtcctggctgttggctatggagaacagaatggattactctactggattgtgaaaaactcttggggctccaactgggggaacaatgggtacttcctcattgagcgtggaaagaacatgtgtggcctggctgcctgtgcctcttacccaatccctcaggtataagcacacggctgcacaggcaacttcgcttggcaagacaaagggaggaacttggttcctacgatgagaatgcgccctggagaaagttgttcagaaattcacccagaggccctctcactcctgagtctagacgcctaaagacagtaaggaagaacttgaccaggcaacaagcccgcccgtgtgacgacatcaccagccatacgctttgtttgaatatggtttttaaatgacccaaaaccatgtggacctagaatcttctcttttcagctctcttcatatagggaaagctccgatggctacccttttctatgttgtatattcaataaatgcagtgaacgcctgcctggctggcctagccgaattc

SEQ ID NO: 1270 - DNA, 680 bp, Rattus norvegicus
tccaccatgattaagggtctctatggaatcaaggaggatgtcttcctcagcgtcccatgtatcctgggacaaaatggaatctcagatgttgtgaaggtgacactgactcctgacgaggaggcccgcctgaagaagagtgcagataccctcgggggaactcagaaggagctgcagttctaaagtctttcccagtgtcctagcacttcactgtccaggctgcagcagggtttctatggagaccacgcacttctcatctgagctgtggttggtccagttgtgttgaggtggtctgggggaaatctcagttccacagctctaccctgctaagtgctacttgtgtactggtaacctggttagtgtcacaatcccactgtctccaagacacactgccaactgcatgcagctttgattaccctgtgagcctgctgcattgctccgcaccctcaccaaacatgctaggccatgagttcccagttagttataagctggctccagtgtgtaagtccatcgtgcatatcttgtgcataaatgttctacaggatattttctgtattatatgtgtctgtagtgtacattgcaatattatgtgaaatgtaagatctgcatatggatgatggaaccaaccactcaagtgtcatgccaaggaaaacaccaaataaaccttgaacagtgagtgattg

SEQ ID NO: 1271 - DNA, 3641 bp, Rattus norvegicus
ggatccaatttgatatggttatatccaattataatttgtataagcaccacatatgtattaggtgtttgttgactccactgcaacacaaattgtactagctgtccctgctgctgctgcactcaaacttgttcctaagttagggccttgtgtgcacctaccattgagccacattcctcactccagttagcaaaatttccaaactattatatgccaggcaatggcttaggtaccaagaataaacaatccgtgttctgtctgggtaaggggcaaattaacaataaacgcccaagtactaggcaactgataatacctaacagtgtaacctagggtcacaagagtaagtctcttagtggcactttacaccagagggctgaggaaagcccaacagattgaattgacaaagagaagtcatgtcatttcacactcagagctcatcttctctcctcccgaatgcctttagcttgctctgcttggaaatatccaggtcttcctcacaccatccttcctatccctctacccaagagtctcccttggctccatactatacagttgaaggtgtgaccggtctcactttaaagacaatgcccccacacaacactggtccgcatcacctgccctgactagagagcacttgtgtgtagctgtggctgccctccaccatgttgggaaggccttaggaagtaagcatcacgcagtgactatttctacttatctccaaaggcccgtgttcagatagaaaacccggggtctcaacacatcccacttgagttaaaatctcccgaggatggcaaaggagggggcaggggtatctccgagttcgaaggcagcctggtctagaatgagtcccggggcagccagggctacaaagagaaaacctatctcaaaaactccaatcaaggggttggggatttagctcagcggtagagcgcttgcctagcaagcgcaaggccctgggttcgatccccagctccgaaaaaagaaccaaaaaacaaaaaactccaatcaaatcttctagattgggccgggcgtgacgacgcggtcgaggctagcctggtctacacagtgtgctctaccacggccagagcaaatagtgaggccctatctcaacccccaccagcacctccacaggtaatttttaatcgatattgtcagctgatgagggcacccgtttgctacgcttggaaccagttagtggcaatccgtttaaagcaatccaagacaactctctcgtcctctgccacggagggaactcgtgagcggtcccaggcaggccgagtacttctcccaccacacaccaggaagtcacctctctgaacctggagttatacctaccgcgtgaggtcagagattaaatggactgtttgtgcactgctcacacacacacacacgcgcgcgcgcgcgcgaaattgcttttattaggagctctcaggaaagtggtggctcgcatcaggctaccacagccaagaggaccgccacctctaccgagggcaggccaaggcccactaaacggcccgaatgaactctaggccttccggcgctctccagctcttcagcgcggcgaacgttctaggcccctgagaagtccaccgggaggcgcaggtttccgctacgcgagggggaaatccccgagaaatgcccagaccacctaagcacagacgtccatgcggcgtacggatacctgagggaatccgggccataccgccacctactcgcgcctcactcaagccgcgccaaactcgcgcgtttcactgcgcaggcgtgtacgcagcgggcgctcaggaacactcaaaggaccagcacactgaccaatcaacgtccgccttggccaaaactagtcccgccctcaaaagcagacgtcaggccccgcccctaagagccccgccctcccccacgctttaggcccgacccacgccgtcctgggttaaggctcgcggttggttcgggggacggacgcgagctctggttggtggaggtgaggtcacgagaacaccttcgtcgcctttccagaggcgattactgggcaagctcagtcttttgcctcagacgctagctgtagctggcaggcggttgtacgtgctccagagtcttcattacccgccgatccagtcgtcttcgcgtgggttccgctaagctcttctgagctgctcgctctctacacacgccgtcgccgtaatccgccatcatggtgaaactcgcaaaggtaataggcctgacgcgcgaacacggacgactaggcctgctttctgagagacgcgcgcgcgcccgtcgcggaggggaggagggcctgcgcacagtcccgggcgcgttcgagggcgcatgctgagggaagtctcgcgcgactagcggaagggtctcgcggtgtttggcctctgacttgagggatgagaggagccgaggcaggttctgggagggcgatgtagagtgcaccggggccgggggtcggtgtgaggggaagtcggaggagttgagcgcggagagggggttggaggctcggcgagtgaagtgggccaaccttaagcggctaccgctctcgggggcccccgcctcccggcgcacgtgctccggtgcgcggcccgccacgtggttacggcgctccgcacgtgtcgcgcgtccgaggcagtgaggggagtgggagtacacgggaaagggggacagtagagttgggccatgttacctagcgatcgcatgtccctgaccgtgacggtagatggacacgtggtgggctcctgaggtagcgcgtggtgacccggcctaggtgactccacgtggtttggctgtaagcgtgagaaagtaggaagtagctccgatacagagatgcttttaagaggtgccttcgagataacccccttccccggcaaatagttaaaatggaacctttaactgggtttttttcttttttgtggaaggtgccagaaaataaagtgccacgactaagtagactttaaaaacctgtggctgtttcctggtgaaggtttctgtctgtaagacaaattatgcgcagttctcagaaaaatttgccaggaagagtgtgctgcctggccacgagaagtctttatgcttgtgttctttagtaagaaaggaggtggtggccgaggacaaagtggcttacaatgcgggtgatttttttgtgtgcatttgtaggccggcaaaacccacggagagtccaagaaaatggctcctcctccaaaggaggtggaagaagatagtgaggatgaagaaatgtcagaagatgaagatgacagcagtggagaagaggaggtaggatgctatttgaaaaattgtgtgatttgcagtggtagattgactggaagtgtcagaaataacagtcagttcggggggtgtctgggcagagttttgtatgttgtattgagtagagtttactgtagatttgtggggtggttttccctccgtttttgggaaaattgcttattctagcctaatttttattcagtccatggtcacttggctttgtgaattttggcaggacattatgacaggaagctgtagaccagcctaacctcagataggttctcctgaattaggtgttagccacagtatccacgacaaatgacaagtttagtgagaaacccagactttgatctaggtagagatggaatcagggtctcagcttaggtggtacc

SEQ ID NO: 1272 - DNA, 1247 bp, Rattus norvegicus
aagaacattttctgtctttttaatgtcagggtcttctgaacctagatcaactcggggttccagtcagacacctagttctgacatcttggtggtcacagctctcctctgggactccacaaagagttaatgtccctggggctcagcccaggaagattccagcctctgcccaggcccaagatagttgctggctcaattcccctggcatgcaagactggagaggaggaggggcccaccagcagctgcttgggattccagaccctgtcctggctccagagaacaaggatggggtgggtgggtgccactaggtgtggacagagagctagtgaaacaagaccgtgacaagtcaccggccagctcagccctgccccgtgtttctcttttcttagctcagtgagtactgggtatgtgtcaccctgccaaatccctgatcacaagtccccatgaactgtcggggagctgggataataaaacccctgacatcaccgttccagaagcttcacaagactgcatatataaggggcaggctgtagcagcggctgaaggagttgaccggctaaccgactctacactcatctagccatcatggacatagccatccaccacccctggatccggcgtcccttctttcctttccactccccaagccgcctctttgaccagttcttcggagagcacctgttggagtctgacctcttctctacagccacttccctgagccccttctaccttcggccaccctccttcctgcgggcacctagctggattgacactgggctctcagagatgcgtatggagaaggacaggttctctgtgaacctggacgtgaagcacttctctccagaggaactcaaagtcaaggttctgggagacgtgattgaggtgcacggcaagcacgaagagcgccaggacgaacatggcttcatctccagggagttccacaggaagtaccggatcccagccgacgtggatcctctcaccattacttcttccctgtcatcggatggagtcctcactgtgaatggaccaaggaaacaggcctctggccctgagcgcaccattcccatcacccgtgaagagaagcctgctgtcactgcagcccctaagaagtagattccctttcctcgttgcattttttaagacaaggaagtttcccatcagcgaatgaacatctgtgactagtgccgaagcttactaatgctaagggctggcccagattattaagctaataaaaaatatcgttcagcaac

SEQ ID NO: 1273 - DNA, 2335 bp, Rattus norvegicus
ctccagtggctgagtgatcaactatactcgatgtatcttccagggcttctgcagaagtgcaagatgtcttcatgacctacaccgtgtatgatgacatcatcaccattaagctcatccaagaagcctgcaaggttctggatgtgtccatggaagccattctgaagctctttggcgaatacttctttaagttctgtaagatgtctggctatgacaggatgctgcggacacttggaggaaatctcaccgagtttattgaaaacctagatgcactccacagttacctggcactgtcctatcaggaaatgaacgcaccatcctttcgagtggaggaaggagctgacggggcgatgcttctccactactactcagacagacatggtctgtgtcacattgtaccaggtatcattgaagctgtggccaaggacttctttgacactgatgtggccatgagtatcctggatatgaacgaagaggtggaaaggacagggaagaaagaacatgttgtgtttctggtcgtgcagaaggctcacagacagataagaggagcaaaggcaagccggccacaaggcagtgaggacagccaggcagaccaggaggctctccagggaacactccttcggatgaaggagagatatttaaacatccctgtttgccctggggagaaatctcactcaactgctgtgagggcatcggtcctttttggaaaagggcccctcagggacaccttccagcccgtctatcctgagagactatgggtcgaagaggaggtgttctgtgatgcttttcctttccacattgtctttgatgaagcactaagggtcaagcaagctggagtgaatattcagaagtatgtccctggaatcttaacccagaagtttgcactagatgagtatttttccatcatccaccctcaagttactttcaacatctccagcatctgcaagttcattaacagtcagtttgtcttgaagacaagaaaagaaatgatgcccaaagcaaggaagagccagccgatgctcaaactccggggtcagatgatctggatggagtctctgaggtgcatgatcttcatgtgttccccaaacgtccgcagcctgcaagagctggaagagagcaagatgcatctttctgatatcgctccgcacgacacgaccagggatctcatcctcctcaaccagcagaggctggcagagatggagctgtcctgccaactggaaaagaagaaggaggagttgcgtgtcctttccaatcacctggccatcgagaagaagaagacagagaccttgctgtatgccatgctgcctgaacatgtggccaaccaactcaaggagggcagaaaggtggctgcaggagaatttgaaacatgtacaatccttttcagcgatgttgtgacatttaccaacatctgtgcagcctgtgaacctatccaaatcgtgaacatgctgaattcaatgtactccaagtttgacaggttaaccagtgtccatgatgtctacaaagtagaaacaataggggatgcttacatggtggtgggtggagtaccagtacccgttgaaagccatgctcaaagagtcgccaattttgctctggggatgagaatttctgcaaaagaagtgatgaatcctgtcactggggaacctatccagatcagagtgggaatccacactggaccagtcttagcaggtgttgtgggagacaagatgcctcggtactgcttgtttggtgacactgtaaacacagcctctaggatggaaagtcacgggcttcccagcaaagtgcatctgagccccacagcccacagagccctgaaaaacaaagggtttgaaattgtcaggagaggcgagatcgaagtgaaggggaaaggaaagatgaccacatactttctgatccagaacctgaatgccaccgaggatgagataatggggcgaccttcagcccccgctgatgggaaggaagtatgtactcccggaaaccaagtcaggaagtcccctgctgtcccgaggaacacagaccatcagcaacaagtctacaaaggagacccagcagacgcttctaatgaagtcacacttgctgggagcccagtggcagggcgaaactccacagatgcagtcaataaccagccatcaccagatgagaccaagacaagtgtcgttgctagtggccctgtgctgtctgctttctgtgttgtgctgtgatcacgagaaaaagtgatcctatgggatccatttcctgtattccatggcagcaaagggaattaatttataaaaatgcttaagttcaaaatgtttttgtttccatatctcccttggggcccctttgagaataaaaaaattag

SEQ ID NO: 1274 - DNA, 1293 bp, Rattus norvegicus
gaattccctgatctgagcagccacaacaaccatatggccaaggtgctgacccccgagctgtacgcggagctccgtgccaagtgcacgccgagcggctttacgttggacgacgccatccagactggcgtagacaatccgggccacccgtacatcatgacagtgggtgcagtggcgggcgacgaggagagttacgacgtattcaaggaccttttcgaccccatcatcgaggaccggcacggcggctaccagcccagtgatgagcacaagactgacctcaacccagacaacctgcagggcggcgatgacctggaccccaactacgtgctgagctcgcgggtgcgcacaggccgaagcatccgcggcttctgcctcccccctcactgcagccgtggggagcgccgcgccatcgagaagctggcagtagaagccctgtccagcctagatggcgacctgtctggcaggtactatgcgctcaagagcatgaccgaggcggagcagcagcagctcattgacgaccacttcctcttcgacaagcctgtgtcgcctctgctgctggcctccggcatggcccgcgactggccggatgctcgcggcatttggcacaatgacaataagacgttcctggtgtggatcaacgaggaggaccacctgcgggttatctccatgcagaaagggggcaacatgaaggaagttttcacgcgattctgcactggcctcactcagattgaaactctcttcaagtctaagaactatgagttcatgtggaaccctcacctgggctacatcctcacgtgcccatccaacctgggcactgggcttcgggcaggcgtgcacatcaagctgccccacctgggaaagcacgagaagttctcggaggtgctcaagcgactgcggcttcagaagcgaggcacaggtggtgtggacaccgctgctgtgggtggagtttttgatgtctccaacgctgaccgcctgggcttctcggaggtggagctggtgcagatggtggtggacggagtgaagctactcattgagatggagcagcggcttgagcagggtcagcccattgacgacctcatgcctgcccagaagtgaagcctggccctagccaccaccaggctgccgcttcctaacttattacccgggcagtgcccgccatgcatccttgatgtttgccgccgcctggcggctgagcccttagcctcgctgtagagacttctgtcgccctgggtagagtttatttttctgatggctaagctgttgcagacactgaaataaattagggtttggcctgcc

SEQ ID NO: 1275 - DNA, 16299 bp, Rattus norvegicus
  misc_feature (1)..(16299): n = a or c or g or t
attcaattgatatagtcccgttgaagacacactttattcaacctctcaaaagtccaagacaataaagtctcaaaccaaaagaaatatgccaagtctcatataagcatgggcttggtagaatattattagagtctacagcagaaacttttcataaatggactaaactttccaagcgttaggttgactgaatggatttttttaatgaaattcaactgtatgctatctacaaaaaaaatctcacaagaaggtgctaagggatggaaagaaacccactgattccaggaaagcaaaacaagcaccagagagagcccttggcatcccaaggcatggactgcccgtgagactggcctacctagaaggagaagagcagcagtgcctagatgctttctagtctgaattagcaaccagccaccatccatttggcatggacaattcagaagaaactatgtaggtgctgggtctgctgtggaaactcaaggacctcacaagagcaacaaataaagccacagacataagctatgcagcttgggaaagagccagtgtgtgaggacccccatatcacacaagactttaacaagagatatttatttttatatgacaaccttgtttgatttttaataattaaatgtttcaagaaaagataaaaagattaatggatgaatatttaaggaaattatgattattctgcttaacttatatgtgcagtacccaggtgttgaaatatcacactgtatcctataagtgtatacgccaaatacaatgaaaaagggaaataaaagccaaacaagtcaatgttcttgactagcacaaagagaggaaaatgggtgcaggtctggctattagccactgtcggctggaaaaaaaaaaatcatgtctctgattcccaaggtaaatcattcctgccaactgaactttgagatcaagattggtctgcctcacctttctccctcccacaggtaggcgggcaatccttacaggatttaggcaagaggcagaaaggatctgtgagagtgagggcagctactgaggagtggctgcaccatgagcgtctctgcactgagctccacccgcttcacgggcagcatctctggcttcctccaagtggcctccgtgcttggtctgcttctgctgctggtcaaagcagtccagttctacctgcaaaggcaatggctactcaaggctttccagcagttcccatcacctcccttccactggttctttgggcacaaggtatgaaggaaagggaaggatgggtgggaaagcagggaagatgggtgtctcagagactggtnatcgaaatcacaggacaaagcctgatgtataaaaattccaagtacctcatgagatacccagctcaggctgaggcacaccatccaacgatagggttattcaaccagtctggctgttgctcaactctgtactgatagccccacactttgaaagctttagttggtcttacctagtctcctcctcttctggctgagtacctttaatatctctgctgttctcaaacaacttttaagtagttccttacctagtgagttacctaccgctattctctcccaagctcagggcttgccagggaatgnatcagtgagttgaaaatcttgcccctgtgggttcttggtagagcagtagtgcacatcttagaagataccaggcacaggaagggttcacattgctgggatcagtgggtggctgccccagactaggagtattttcaggattggtgaaggtccaaattgaaatcccaaagtcatggcacattaaaggaaaaggctggggagggtcctcagatgacagcactaatgttagaattcccacagggtcatttagctctcccttctccttcccacacaccctgcactgtaagctacttagattgaatttatttccttgtaccacagagttcagctcaagagccaggaacagattataaaattccctagaaagggatagcagcctgtaggctaggaaggctgtaggccactgacccattgcactgtcaccccagggaataatgtacagagccaatgaggctacatagaaaggcgttcaacaaaggattgtgcaatagatgctcttagaaagacctgggtatgcagtgttttgtgtgcagatctgagaatctgaccctgtggctcctctgaggaacacagctccaaccaccaggactctcgaatctccctcaggatcagccctcgtacagcaaagctatgagtaatagcacagataattcatcgaactgcctcaccctcctgacagcttcggaaaaatccaaaactatgttcctgtgtttggtctcctcttgtctccagtccaaaaaataatcaagagtcccactaccttctttttccctcaacagcagtttcaaggtgacaaagaactacagcaaattatgacatgtgtggagaatttcccaagtgcctttcctcgatggttctggggaagcaaagcctacttaattgtctatgaccctgactacatgaaggtgattctcgggcgatcaggtgagcgtgacacgctgttgtgaagacataagcacattcctccttggtacttgccctaggctgtcaaattccagaagagcgtgaccctccacactctaccattcttccagactacaacccagcacagggccaacaatactcagaactgaaaagtcaaatctcttagcctaatgtctttgtctttctttattatttattcaaattaagatggtaagtctagttaattgtttcaggtttgaaatctctaattgttacctgcctgactcatagaataacgaagccaccacaaacacaccaacacacacacacacacacacacacacacacacacacacacacacacacaccacttgttccattctttgactttgatctcatggactgtttctcaccagctcagcatctcagccatggaggagtccagctactagaacacgaatcctaaccttcctaagcctgaatgttaggacagagtttgaagggaatatgagaaattgggcagtgagttcagacagtttgccaacagacagcacttaaaacatcatagaaactcgtgcctttaaccacagttgccttggggctgccttttaatcccttttcttgttaagtcattgtttccctttcagatccaaaggccaatggcgtctacagattgctagctccttggatcggtatgtatgtctaagttgggaatgtggtctacttctaattggattttccgagtgctgtgcctctggttcacagagaataaatgtgacagactgccactatcatggtctacccccaaatctctacttctgacccttcacttctccaaacagtcctatctgaacatcagtgtgatctgcctccttctaactctttccgagttttatctcacagctctcataatcacagcatgtatgccagtgccgctagctgggaaattcacgttctggactgtagcattcttcagaattatctctaacacttcatagttccctgtccccaatttatttagtggtctctctgatttgatcacacatatacacacacctctctcctgcccaggatatggtttgctcttgctgaatggacaaccgtggttccagcaccggcgaatgctaaccccagccttccactatgacattctgaaaccctatgtaaaaaacatggctgactccattcgactgatgctagtgagttcatttaactttattctcctctattcccctcagctgtgctgttctttctacatcagctgcagctttggctactactactgccacagataccatagctgctgtggctgcggctgcttcttcttcttcttcttcttcttcttcttcttcttcttcttcttcttcttcttcttcttcttcttcttcttcatcgtcttcatctccttttttcttcttccttctctgcttatagtctcctctctcctcaatctctctcttcacctactcagtgtatgcatcaacaagctttacatatgtattctactttgaatacaggttcttcacatatagttaaaatagaaatattccaggtactaggatatggccatacttgcttattacccaaggcaaagagcatcagagcatcttctccttcttcaaatcttcaactttagagagacttcccaggatgacacttagttggggtttcccttgggtcttagtgcttctgcatggacttgagtcagagagatggactccagatccacattgtcagagccaaaccttccataccaccacctttcaacaggcctctgggttatgactgttttagttcattggagctagcttatagttcagaggttggtccattgccatcatagtggaaattatggtagaacacagacatatatggtgtgctagggaggtagctaagaattctatatcctgatgcaaaggcagcaggaagagagtgagacactagtgtgccttgagcatctgagttctcaaagccctaccccaatgaccacttcctccaacaagactacccctactctaacaaggccacacctcctaatggacctatgagggccgttttcattcaaaccaccaaccacattcctctccctgacccccataagcttgtagccatatcttaatgcagaaatacaatcagttcaacttcaaaagtcctcatagtctaccacagcactgttcaaaagttcaaagttcaaagtctaagagactcatgcaatctcttaactttaatcctctataaaatcaaaataaaaaaaacagattacatactcctgacatgtacgggatataccttacaatcccaaaatggagaaaaggcagcatggtgaagaaatactgaaccaaagcaagactggaaaaacgttggcaaactccaaactctgcatctcaatgtcttatgtcaaagtgctcttctgatttccaactcctttcagctttgttggctggttccactccctgttagcagctttgctcagcaaacaacccacggcatctccaacactgtaggcttccaaggcaattgtggcttcatcttcaagcttcacacagtaacctctttaagcctctatgcaagaacacccatcacacgtgcctggcttcagcagttttccttagacaaggagggcaatcccataatccattccttctttccttgactctaaaccagaaccatgtggccaaagctgccaagttctcatactcattcaattacatcttcaccagctggttttgatggtttcctttactgcctaagcttggctgtcctaaaactcaatctgtgtaacaggccagccttaaactttaagatccacaaacctctgcctcctgagcacttggatcaaaggtgtgcaccaccaggcctggccctgggcttttctttaattccttttcacttttctttaatttcttttccaaaattggaagtttatctgggtgggatcttggtctgaggtcaccgctccctttattccacttagcatcaagcttttctctaatctgtttatctccttcaacacaggccttagctacagtctacttcctggtgcctcctttctcctcaaagtatgcatttttgtattttttctctttctcagtttgctccttttcactgtagatttgcatgagcgaatactaataaccatacaacaaaatccatactaggcaattgtaagatatcctctgccaatgcagctaatccaactcttcaccttagccttaggcaaaccttttgaacaagggcaaaagcagccacattctttgccaaaatatcataagatatctacgccacatactaaaatttttctcctctgtaacctcttgagccaggaccccacaattcaaattaccctcagccccaccgtccttcaactactacagcccattaagccccacttaaatcattcaaatgcttttataatccaaagttccaaagtccacattactccaaacaaagcatggctaggtctatcgcagcaataccccattgctggtaccaacttctgtcttaattagggtctcattgctgtgaagagacactataaccacacaaccaattataaaggacaacatttcatggaagccagcttacagtttaaaggtttagtccattatcatgatgggaagcatggtagcacaaaggcatacatgatgctagagaggtagctgcgagttctacgtcatatccaaaggcagcaggaagagagtgaaacactgggtcaagcttgagcatctgagacctcaaagcctgccccgcagtaacgactttctccaacaaggtcacacctaatccaacaagtccacacctcctaatagtgctgcttcctagaggcctataggggctattttcattcatccacaataatgagtcaattgttctcagcaagcttttgatgaatacactggggacccccattagaaatgccttcgtggctacttgggtgtttttatactctatatgtagaagtcctaccattatctcaggttgagctgagctctccaatcactgatgtatcatctttttaatctcctaaaaacagaattgcttatcaggtaaaacatgttaactaactgcaaacatgtgaaacttgtttcctttcttatgagtttctatatttaattttgaagtaatttacaagaatataggtgtcctttcacaaagatttgttttgcagtctgtaaaacatctgttatcaaaattgagtaacttagaacatagtatcttacaatatagggaaacaattcagtctattgagcacatattttctagggaaattaagtcaatgttcccctcccactacaggacaaatgggaacagctggcaggtcaagactcctctatagaaatctttcaacatatctccttaatgaccctagacactgtcatgaagtgtgccttcagccacaatggcagtgttcaggtggatgggtgagtgacaacccttgatcttcagggcctttgatcttaccaactaatatggatttatctgtgatgcatgtgggacattttggatactcaataaagagtcttatcccagccccaagtcaatccctgacccaattgaatcctatcccaaccacagaccactgatccctagctgaggtggaatcctagacactcatgccaccttctaccaccttctaccttgaaaattacaagggttatgagacagagttatgtgcctcagtgttgtctcttcttatcatatagaaatctccccagagtccgtactatctgtgggttggagagctctacagtctaatctgttctacttcttcttcttcttcttcttcttcttcttcttcttcttcttcttcttcttcttcttcttcttcttcttcttcttcttcttcttcagaaattacaagagctatatccaggccattgggaacttgaatgacctctttcactcccgtgtgaggaacatctttcatcagaatgataccatctataatttttcttccaatggccacttgttcaaccgtgcttgtcaacttgcccatgatcacacaggttctgtttgtgccttctgtctccctcatttcctaagatcagctcaagggggctattgatgacttctgaggcagatccagacccttcagtgcatccccctataggacctgggtcacatccatgctagttacttttacactgacaatgttagcagttggaatgtcagaatgccaggtgttgaatgtatgtcatcatattggtaatgtgtagtgagacctgacccagcaactcaagcagagcttctattgcccatggtgctaagagagttctgacctgtgtcagatcacactggtcctctaaccctacccaatcctatatagcgcacccgcacatagcttcaggcaaggagacacatggagctacatggggttactgtagctctcaggtctttggaataattgatgttctggaatagatggtgtgatcaagctaaggaaggatcagctgcagaatgcgggagagctggaaaaggtcaagaagaaaagacgtttggattttctggacatcctcttacttgccagagtgagtatgtgcagcagaggcctgagagtctgcctgggaacacacaaggaacaagtatagttctgatgatgcctgttgtttccctcagatggagaatggggacagcttgtctgacaaggacctacgtgctgaggtggacacatttatgttcgagggtcatgacaccacagccagtggagtctcctggatcttctatgctctggccacacaccctgagcaccaacaaagatgcagagaggaagttcagagtgtcctgggggatgggtcctccattacctggtaagagttcaagtagaagtgcccttattctttgggtctccagtctacctgacctccacattggactttatttcagggatcacctggaccagattccctacaccaccatgtgtatcaaggaggccctgaggctttacccacctgttccaggcattgtcagagaactcagcacatctgtcaccttccctgatgggcgctctttacccaagggtatgaatttcccaggcctttcatcctagagagaatggatgctcagtagtctgtgtccttcaacagttctgaatccctctgagtgccgtttccttttcagtaaataaatgcttcttactcataaagtacagtaataagcttaaatgacctcctataaagttaaatgctactttgcatgaatgacattgaaagcattcttcatcagctaacattccttcttcttttgaatctatgatctcatcatgaagcatccattctaatttgggaacaatgatgttttccagactcaattccagatgccagcaccatataactcatagccacacttattcttcagatgtcctcactgtcacatatgttttcatgttggggctggaaacacaggcatatgtttgtacatagaagtgggaggcagaggtcagcattagttgtcattccacaggcactgtccaccatgatttttcagttcaggaggtcttgtactggactgtagctcatctcttaggctaggctggccactgagctaggaacctgcctgtccccacctcaccagcagtgggataacaagcatgtgccaccacacacagtcttttttatatggattgaggtctttctctcaatccccaatcttttatcatgttctacatttgatataatgtgtagacatttttataaaaaactactatttatatatagatcagtaaataaaatgtgacctcagattcttgccaaggcaagtaaccggttactctccataacctgatagtcagaccctattgctgaagacacaacttatgtcatcaaacacagagaaaatgatctggtgcccaactagatttagacctaattattaacccaaatagtgaatagggtctctttttcaagcttatttcactaatagttttacattatacatttatacatatatttatattatacaggcacagaacacacacacaagggtggggagagagagagagacagagacagaggcagagacagagagacagtgacaaagacagagagagagagacagagttttcaaaaataaaaagagcaaatcaggcaaatttaaacagaagaggaagagttttttcttgcagagctccttggaatcttcaatgtgtctatctagatgtctgtgaaggaaataaggaacagagtttcctcacgccctgatgattgacatcttgtctctagcgtacattggaagtggagccccacagttcttttctgctgaccttttgctgtggcttggtatttgtttcctgccaaactcatacagctatgtaatacccagagtcacacgttaatggggttgggagggtgaaagctttgtgaatttatgttaatcatggtggtgctctaaattgtactgaaggcctcctgtttgctaagcatgtgctctaggactgagccacttaccatccccaagatgagatggataaacttggcttgactacgtgctttagagcacctgggagtggatagattacattagggttggtctcacattattctatatagtggctttagaaagagaaggagggagactgctaagatatacacctgtcctcaccatgataggatgcaaccaagggagagagctgtttgaactttcagctccaaatctgagctaaataagcttcatatatacatatatatacatacatacatatatacagacatacatacatacatacatacatacatacatacatacatacatacatacatacatacactgggatgtacagggtagatagagaatcagacaggggctagaggaatgtgtttcttttatgagacaaagcaagtaaaaaagagcaatgaattccatgccgtgagtcatatgtggtccagtctctgagaaggcacttgggttagtgacagagatgaactgatcaccaaatacaagacccctgcaatgtcaggaaagcaccctttgtctcacagctcattatggcaaaactctagtattgccacatcctgctttggtgatatgtaacccctctctgaaattttagtaactcacctgaaaaaaaaaacagaataaatcaactcactctggggacttaatatcttaatatcttaacatctttagtggaaatccttcatcaaatttaagttctaactttatttattcccaaaaccggttcatcttttttgcttctctctctctaattccatttttttatacttctcacttgtgcctcaggtttgtttccaactcatgcacatgtgctgaaagtgatggtctatagcaccctaacctcttgtgcaaacgtatcattccctgctgtctcaggaaccaaggagtcacccctgggtgtaacccatcttctctcacatttctatctgccccacaggtatccaagtcacactctccatttatggtctccaccacaacccgaaggtgtggccaaacccagaggtaggaggttcccccaaggagggcagaggagttggtctcaagatcaataccacctattgtccccacctctaggcacattgtccattgtgagttgcaagcaagggtttgacctctatctatcctgactgaagtgctgtctccctgcaggtgtttgacccttccaggtttgcaccagactctccccgacacagccactcattcctgcccttctcaggaggagcgaggtgagatagcctgtgtatgatgattgatatactgtaaagatctttgcagcattccttggttttatctcatgcatatatggcatcttcgggtatatcctgattgggggtgggggggagaagcttcttgaggatgtgtctgtgcaccaaaggagggtggcatttcatgacacactgtgaagacattaacccattggccaaacaaatttctatgcagtgcatgcacttgcttgtgttctgatgtttccctcactttaagggcaggactttacattgatttttttcacatgactttaacttcaggtgtccagcttgtccaatttgggggctcttaaagggcatgtcttttccacacctctatctgacccatcactattcctgcgtagttctctattctagaatcactgtgcaaggaattaatttgcttgcatgtctgccacattcaactgtccagtgaagtattacatcatttgaggcaaggttcacaccagggtatgctaattccacctttgctctctctctcccaacacaattttcaatccgtgttgatgctcacatctctcttgcaattgcccaatggccaaagcttgacagataatgtatattcctcaagtgaggctatgtagtctaacttcagacaaaaggcattaaaaagaaggagagtaatctgctctgaagtaaacctctattttacatataacagcatttttaaggtttctgggagtgaaatagaagacactcttgaaatagctactgaactggacaaagactttcccatggcttctagggaaatccttccacgggacctaactcactgcaaactttaaaaggtggtgcagaagaaggattttctgagcctatttttcatgaattcatgaagtggcaaatcagttttcacagaacaggctagaagtaagttgttcttccagacacaggctatgtccacacacttggcaaacttcaggattgaatgcactcaccgcaaatcatgccactgccactagaagacaggagagtattgtcttaactcagtagtaactcagcttaactcaccgagccatgctgctggtggtgtttgctaagacagagtctcaggcttgtctggagctcatggtccctctacctctgcctcccaagtgttgggattcagacacagtcccccatggcttgctttggtcagaagctttttcatctttattatatttcgttctattttttttcatcccttaaatccacatgaattacattttaagaaccaaggaaaggtaactattttaactgcaaaataaattttaaacaactcctgtgtgtccggtgctatgctataaaaatatagaaataatgatactatcccattcctgcctctaagagttcaaaactgtggcccacaaagacaaatatatctgtgattaaaatatattcttcccccattctttcactcatccactcagcagtttgcagaatgttccatgttcctggcatcatcccacgccctgagggtggcatggccttgaatatggtatagatggtgccttgaggcctagaaggagcagggtcagtcatcgaagaaataagagccaatcactcattgacctgagcttaggggatatgaaggaaggggtggtcctcaaatacctcaacagcttgatcttaagtaggaagtgggatgggcaggaaagaggtgagggcagcagccagtagagggtataactgcagctagacctttgttgttttgttttgtttaattttatatttttatttattcactttacattctacngccttccttccagtcacccctcccacaattctcccccctttcccctcccctcttcccctcctctgagcagatggaggcctccagagtgccgccaccccccacccccccaacccccccaccctgtgtacttcaagtctctatgagactcggcacttcctctcccactgaggccagacaaggcagcccagttagaagaacacatctcacatacagacaacagaaaagctaaacaagaagaaaagcctaagtaaggaagctcaaatctcacttagaagaggaaataaaagtcataagaggcagatggagggagagaactgggaggaagagaaggagaggagggggtgggggtttaggatcaggtatggggaaggacaggagagatggccggatggccatgaaaattaatggaaatctgcaactgatgggggtgggggaagcatctccaggaggagacagagacctgggataagggaggagcccaaaaatcaatgggggtgaccttagctgtgactcactacactggagatatggaacctgaagaggcaactaggcattgaacacagccctacctggtggaggtatagaggatcagtgtggagggagggccagggagaccaaagaagcccaggaaaggaaactgaagaaggaatagtgtacatttctgaagtagagttggaaagctatagaggccgatggattaaggatgtggggtaccctaagtaggaggcagatggggcagacacttgaagatcctcaacacagtcttcctgtaggtcctcttctactgatacccaattccactctgtgaaagctatatgctagatcttcctgaatgaagtaaacgattaacttattaaatgattcacaagtttgacttctagtccttaaaatactgtcctaacagatttcatacgtctaaaacaagaaaaactaggatcaaggtggcattgaaaaatgttgaggctatgtcaaaaagtcaggagagccaagtaggcatgacccgtcatctcagccattaaactgaacctgtgacagtaggccctgagtgttgttctgggatccttcacgggtcagcccttaaaacaggtaagaagctaatgagttttattttccctttctgacccaggaactgcattgggaaacaatttgctatgagtgagatgaaggtgattgtggccctgaccctgctccgctttgagctactgccagatcccaccaaggtccccatccccttaccacgacttgtgctgaagtccaaaaatgggatctacctgtatctcaagaagctccactaattccggtaaggacaaggacagactctatgaacatgtggcctggcaccttgtcccctgtcatcccttcctgtcaccatcttgctttctgtctgttcatcctcacacctatttgctccctggcctcttggtctcctcctctctctctctctctctctctctctctctctctctctctctctctctctctctcctctagattccccatttgttttttggtctcctgctacccacatctgactgtgcacctgatcctgaacatccttcatcctccatccttctctccttgcctcttcacttcttaccatctttttcccctacaggacttcttcattataccaataatcaacggtcacaaccttgatggtcgggaataacaggacgttattatcttacagttgtggagctccgaaatctgaaatgagtttcactggcagaaagctgagttggtggtgtgactagccttcttcagaagagtgcttcagagagtcctctcctcctctcttcagtacagatcacccttctcagcactggaatattcctctgctttaaagccagcacccttcccataccccctcttctaaaagccttcccttttacaaatgttcttatgacatcatcaagaccactgaaaaactccaagataatttcccatctcaatattccttactccatctaacctactaagtcccttttgaattatgaggaataattcaatttgttccatgggctccaaaactcaaggcctgagcattattgtgaaacctttattcagcctaatatcatcttcacaagactgttacctggtacgttcatctaaatctcccctgcatagtctctctacctgactattcctcacacaagtttctttaccttccctcctttctccaataaagtgtccagtgtcctgcacagcatctgtcttctcatgctggctctgaacacaggttcccattctgtttgaaactgctcctggatcaggatccatgatgagttctctgccttccctgagatgccatgctctgctttctcacacacacacatacactcacacatacacacacaacacatacacacacactcacacacacacatacacacacactcacacacactcacacgtacacacacaacacatacacacacactcacacacacacatacacacacacactcacacacactcacacgtacacacacaacacatacacacacaacacatacacacacacacacacacacatgcacacatcagagttcttggatttattcaaatactcatgaagaactggtattaataatggtgtcttgattagaagacaccagagtcaggaagcttcagctcaagttccttctagattagtgttccgccggttccttcctttaatatttaaattcagtcacagcctcctcctatcagagagggggtacctccacccagtctacactacccgagtgccaaggtgctgaagaaacaaatgttacagtttagactcaggcaccacccagtgacgcatgatggttatgactggagaatcagcgcccacgtcataactgttgaaatcttgctacatctgttcagagaacagtttatctgtgtgctagggcaaaagggcaagttagttgcattaaggcttctagctaacaggcacactataatgggaccttaacatcccagcttcgagtgtacagggagggctttacaggagttagcaagtatcttagggcagagcttccaagctgtggacttcttccaagcagaaaagaattggtagtaggaaaggtatatggcacatttcccaagatgccctagagtggtggttctgaaccttcccaacgctttgaccttttaatacagttcctcatgttggggtgactcccccacccccacccccaaccataaaattaactcattactactttataagtgtaacttcgcaaagaacataatataaaatctgtgctttctggttattgttggtggctcctgtgaaagagtcattcaactaccaaaggggtcatgagccacaggtaaagccactgccctagtcccagggctagaattc

SEQ ID NO: 1276 - DNA, 539 bp, Rattus norvegicus
cctcggcctccgggctgcgggaacgcccggactgggaacgccacgtcgagaggcgttcgcggaaggcgcgggatccaggacgtgctggtcacccccaaaccccaggccacccattatcgccttggttcgcccatcagagttgtaagaaaatggcagacaagccggacatgggggaaatcgccagcttcgataaggccaagctgaagaaaaccgagacgcaggagaagaacaccctgccgaccaaagagaccattgaacaggaaaagaggagtgaaatctcctaaaagcctaggaagatttccccaccccaccccttcatctccaagaaccccctcgtgatgtggaggaagagccacctgcaagatggacgcgagccacaagctgcactgtgaacccggcactccgcgccgatgccaccggcccgtgggtctctgaaggggacccccccactaatcggactgccaaatttcaccggtttgcccagggatattatagaaaattatttgtatgattgatgaaaataaaacacacctcgtggc

SEQ ID NO: 1277 - DNA, 1164 bp, Rattus norvegicus
tggaggtcagatgaggatgctggatcccctgtagctgagttacaagtggttgtgggcagccccattaggtgctgggaactaaaaagggtcctctggaaaagcagtcagttactctaacagctcccccttccacttcctgacaaggccctacaagttctgtaggataactttaccatttttgttttgttttgggaaaggttcttaccatgtagccttaactatcctagaaattactacattgaccaggctagtcttcaactcacaagttccgtttgccggctcactcctgactgctgggattaaaggcatgggccaccatgccccacaaacataatttttatttaaggacatttaaaacctttttgtccagttctatattctgatgtaaatttcgtgtaaagttattaagttccacctgtggctacacaaatatttccctatggctgctgtctcccccgccagttttgctctggttcctggagggccacacagatgagttcgggggggggggggtggaggggtggggccacgacaccaaagctgaagagacccaagcgtgtacacccaagggccaccttttgcagtttctaagagcagaatcagaacgctgaaaagaagaaacgaattcactcacactagagacaagtctctcagagatttcagtctagagtcacagtgacttggcaaaatctgagccggtcctttagctgccccacccttccccttgcgtgcaaaggcgatttcccacatctgaccaaggactaacccacacaggcaggtcccacgaagctcgaaaattttctgttggaactttccattttgttcccagaagatcttggacagggagcagttgaatttacccaatatgtaaccatatcctcaaaacctctctcactctcaagctcccagaaacccttttgacttccatatacagaagtcctaggccagccctaaactgcttctccctgccaataacttggtatcctccccccagcgcctctgggctcggcaatccagccccgccctcgctggctgccctgcacagtgggctgggccggaaaagcaagatataaagcctgaaagtgctcagtacagctcgcactagcctaggctgtggcacgcaggatctttcctgaagcatttcagggtctgcctggcaaccag

SEQ ID NO: 1278 - DNA, 1500 bp, Rattus norvegicus
cgccgagcacaaacccagcgagcattgaacactgcacacggccatctgcccagagagctgtgaccaccacttccgctactatctactcagaaagtcgtgactactgagccactgctgcctgcccagattctcatccaccgcctgctgcgtctggttgcgatgccggagttcctaactgttgtttcttggccgttcctgatcctcctgtccttccaggttcgcgtagtcgctggagccccccagccatggcactgtgctccctgcactgctgagaggctggagctctgtccacccgtgcctgcttcgtgccccgagatttctcggcctgcgggctgtggctgctgcccgacatgtgccttgccactgggtgctgcctgtggtgtggccactgcgcgctgcgctcagggactcagctgccgtgcgctgccaggggagcctcgacctctgcatgccctcacccgtggccagggagcctgtgtactagaacctgccgcacccgccacgagcagcttgtccggttctcagcatgaagaggcaaaggctgctgtggcctctgaggatgagcttgccgagagcccagagatgacagaggaacagctgctggatagcttccacctcatggccccatcccgtgaggaccagcccatcctgtggaatgccattagcacctacagcagcatgcgggcccgggagatcactgacctcaagaaatggaaggagccctgccaacgggaactctataaagtgttagagagattagctgccgctcaacagaaagcaggagatgagatctacaaattttatctgccaaactgcaacaagaatggattttatcacagcaaacagtgcgagacatctctggatggagaagctgggctctgctggtgtgtctacccatggagtgggaagaagatccctggatctctggagaccagaggggaccccaactgccaccagtattttaatgtgcaaaactgaaagttgtttcctccctccttcttcacacaaaatatttaagtatatagtgtatttatactccggagcacaccattttatatatgtgtatatgtatatatccaggaactagtttttatactccacatgctgcttgatgtacaagtgggtttgtatttattcactctaagtttatttttttctaccctgtccttgtgctgtattaatttatataactgaagcttttctcatctccatacatgtaaatactaccatctcagctcttccagagttctgctttgaaagggcagcgcggtagtgcctagaacgagcacaagtcagtctgaggtaggggcctttcagtgggttcagggaggaaggttagccctggctcggggagacttcctcatcgaatcccacaggtctgtgtctgatgcctattggctgggaaggttccgatgttggttgtgtaatcaaagctaaacgtggaaagctgcgtcccatgcactgttaaacacacgtctggaataaaacattctacctgga

SEQ ID NO: 1279 - DNA, 3876 bp, Rattus norvegicus
ctcagattggagtgaacaaccatcgccaccatgggggagcttttccgaagcgaggagatgaccctggcccagctctttctccagtccgaagctgcttattgttgtgtcagtgaattagaagaacttggaaaggttcagttccgggatttaaatccagatgtgaatgttttccagaggaaatttgtgaatgaagttagaagatgtgaagaaatggatcgaaaactccggtttgttgagaaagagataagaaaagctaacatcccaattatggacactggagagaacccggaggtgccctttcccagggacatgatcgacttggaggccaatttcgagaagatcgaaaacgaactgaaggaaatcaacactaaccaggaagctctaaagcgaaacttcctggaactgactgaattaaaatttatactgcgcaaaactcagcagtttttcgatgagatggcggatccagacctgttggaagagtcctcatcactcttggagccaaacgagatgggaagaggcgcgcctttacgacttggcttcgtagctggtgtgattaaccgggaacggatcccgacctttgagcgcatgctttggcgagtgtgccgagggaatgtgttcctgagacaggctgaaatcgaaaacccgctggaggatcccgtgactggcgactacgtgcacaagtccgtgttcatcatttttttccaaggtgaccagctgaaaaacagggtcaagaaaatctgtgaagggttccgagcctccctctatccctgtcctgagactccacaggagagaaaagaaatggcttccggagtcaataccaggatcgacgatctccaaatggttctgaatcagacagaggaccaccgccagagggttctgcaggcggctgctaagaacatccgggtgtggttcatcaaggtgcggaagatgaaagctatctaccataccctgaacctctgcaacatcgatgtgacgcagaagtgcctgatcgcggaagtctggtgccccgtcactgacctggactccatccagtttgcactgcgaaggggcacggagcacagcggttccactgtcccctccattctgaacaggatgcagacaaaccagacaccccctacgtataacaaaaccaacaagttcacgcacggcttccagaacatagtggatgcttatgggatcggcacttaccgagaaattaacccagctccgtacaccgtcatcaccttcccctttctgtttgctgtgatgtttggagattttgggcacggcattttgatgactctgtttgctgtgtggatggtgttgagggagagccggatcctctcccagaagaacgagaatgagatgtttagcatggtgttcagcggccgatacattatccttctgatgggactgttctccatctacactggactcatctacaatgactgcttttccaagtctctgaatatctttgggtcatcatggagcgtacggccaatgttcaccatagggaactggacggaggagacgctcctggggagttctgtcctccagctgaacccagctatccctggagtctttggtggcccttacccatttggcattgatccgatttggaacatcgcaaccaacaagctgaccttcctcaactccttcaagatgaagatgtcagttattcttgggatcatccacatgctgttcggggtcagcctgagccttttcaaccacatctatttcaagaagcccctgaacatctactttggctttattcccgagataatcttcatgtcctcgctgtttggctacctggtcatcctcatcttttacaagtggacagcctacgatgcccactcgtctagaaatgccccgagcctcctgatccatttcataaacatgttcctcttctcctacccagagtctggtaacgcaatgctgtactctggacagaaaggaattcagtgtttcctcatagtggtggcaatgctctgtgtcccctggatgctgctgtttaagccgttgatccttcgccatcagtacctgaggaagaagcatttgggaactctcaactttggtgggatcagggtgggcaacggaccgacagaggaggatgctgaaattattcagcatgaccagctctccacccattcagaggacgcagaagagcctaccgaggacgaagtgtttgactttggcgacaccatggtccaccaggccatccacaccattgagtactgcttgggctgcatctccaacactgcgtcctacctgcggctctgggccctcagcctggcccatgcacagctctctgaagtactctggaccatggtgatccacatcggcctgcatgtccggagtctggcagggggactggggctgtttttcatcttcgctgcctttgccaccctgaccgtggccatcctgctgatcatggaaggcctctcagccttcctccacgcactgcgattacactgggtggaattccagaacaaattctacactgggactggtttcaagttcctccccttctcctttgagcacattcgggaagggaagtttgatgagtgagtctcaggcagggcgcatgctcagagcagctctcctgcctgcctctacagtgactgtgtctcttgcctgctggttgtgatccctggatactcgggcgtttgtgtcaccctacaacccctgtccccgctgtgactcatttaggttgtgctggccttccctgggtctctttctcccaagccttgggtgttacgtacagactttcgactgagagctggatggctgtgcctgatacccacccatccccatggcaccacttggcctcctggcctccagacagatagccctattccatcccctaatggtgagccaacctgcacagacacataggggcacggagccctcaggatgcaaggggtccctcatcagtccaggagttcttggtcacgccttggaggaagatggcaatgggttctctcctagaaggggatattgcttatggaacatacccgactccgctggcagggacagtcaggaagatgctgctgtcaccctttgtccagcctctccagtgagtattcaggaaactcagttggccctacctgggccatctcaaaggttccaggataacccccaccctcctagcccccaccctcctaaacactctcctcccccagccctgttggcacagcatagctagcatccgtagaatgggagggtcgcactgacttgcagcaccgggcttccggaccttagattcccttctctgtcagtgcgtgaatgggccttgccaacactacaccccaaggcagaagttaaaattggcacactcccggcatatccctgagcccttctgcaccctgatcatgatgtcctgaggctgtggtcagtaaggttggttctgccggcaggcctgccttgatctgcccacttattactccctctccaatccccatgctgaccccaggtttcaggagtggcgtcctggacagggaaggtcagtgtcatttacaatttgctaatcagaggcgactgttgggctaccagagcagatgtgggagcgctgctaagcccttgccgcctacctcatgtactgtggatctcagacccttctaatcatgtgctgactcccgaaattcactcactgccttccctgtggaggtaatactaaatcagcaaggcccctcccctcccccaccctggcgctcttgagccgctcccacggtgaattgttcagagcccctctgtccttttgtgcccagtttacatgatgatctctgctgtttacagagaggcccacagcagaggtctctgtggggaccctgcccaaggccttctgttcagacattcttatccggaataaagtgtgtttgactctgacaaaaaaaaaaa

SEQ ID NO: 1280 - DNA, 4400 bp, Rattus norvegicus
gtatagtttcgtgtgaggggtttccagccccaagaatgccagctatgaaactagcagggtcgcccacccacaactccccctccatctttttatggtttggctcgctctccctcaccctctctcacacacgcacgcacacacccacctctcccataaacacacacacacacatgcacacccacatccacgcgcgcccgcaccgccccacgcgcgcacactcccgcccacgcccacgccgcgctccggggagtccggtcccggccagagcgcgaaaggacacggagaagccacccgccgggagcgcagcggcgccctgggacgcggcgcgtctccgctggggctcggcctgggggccgctggccggcgatggccctggattgcctgctgctgttcctcctggcatctgcagtggccgcgatggaagaaacattgatggacacaaggactgccactgcagagttgggatggacggccaaccctgcctctgggtgggaagaagtcagtggctacgatgaaaacctgaacaccatccgtacttaccaagtgtgcaacgtctttgaacccaaccagaacaactggctgcttaccacctttatcaacagacggggcgcccatcgcatctatacagagatgcgcttcactgtgagggactgcagcagccttccaaatgtcccaggctcctgcaaagagaccttcaacttatactactatgagactgactctgtcattgccaccaagaagtcagccttctggtctgaagccccctacctcaaagttgacaccattgctgcagatgagagcttctcccaggtggattttgggggaaggttgatgaaggtcaacacagaagtcaggagctttgggcctcttactaggaatggtttttacctcgctttccaggattatggagcctgtatgtctctactttctgtccgtgtcttcttcaaaaagtgtcccagcattgtgcaaaattttgcagtgttcccagaaaccatgacaggagcagagagcacatctctggtgattgctcggggcacatgcatccctaatgcagaagaagtggatgtgcccataaaactctactgcaatggagatggagagtggatggtgcccattgggcgctgcacctgtaaggctggctatgaacctgagaacagcgtggcctgcaaggcctgtcctgcgggaaccttcaaggccagccaggaagctgaaggctgctcccactgcccctccaacagccgctccccttcagaggcgtctcccatctgcacctgccggactggctattaccgagcagactttgatcccccagaagtggcgtgcactagtgtcccatcaggccctcgaaatgtcatctccattgtgaatgagacatctatcattctagagtggcaccctccaagagagaccggtgggcgagatgatgtgacctacaacatcatctgcaagaagtgcagagcagaccgccggagttgctcccgctgcgatgacaatgtggagtttgtacccagacagctgggcttgactgagtgtcgtgtctctatcagtagcctatgggcccacaccccatacacttttgatatccaggccatcaatggagtctctagcaagagtcccttccccccacagcatgtctctgtcaacatcaccacaaaccaagctgccccctccactgttcctatcatgcaccaggtcagtgccaccatgaggagcatcaccttgtcatggcctcagccggagcagcctaatggcatcatcctggactatgagatccggtactatgagaaggagcacaatgagttcaactcttccatggccaggagccagaccaacacggcacgtatcgatgggctacggcccggcatggtgtatgtggtccaggtacgagctcgaaccgtggctggctatggcaagttcagtggcaagatgtgcttccagactctgacagatgatgattacaagtcggagctgagagagcagctacccctgatcgctggctctgcagcagctggggttgtatttgttgtgtctctggtggctatctccattgtctgcagcaggaaacgagcttacagcaaagaggctgtgtacagtgataaacttcagcattacagcacaggccgaggctccccagggatgaagatctacattgacccgttcacttatgaggaccctaatgaagctgtccgggagtttgccaaggagattgatgtgtcttttgtgaaaattgaagaggtcatcggagcaggggagtttggagaagtgtacaagggccgattgaagctgccaggcaagagggaaatctatgtggccatcaagaccctgaaagctgggtactcagagaaacagcgtcgggattttctgagcgaggcgagcatcatgggccagtttgaccatcccaacatcattcgcctagagggtgttgtcaccaagagccgacctgtcatgatcattacggagttcatggagaatggcgctttagactctttcctccggcaaaatgacggacagttcaccgtgatccagcttgtggggatgctgaggggcatcgctgctggcatgaagtacctatctgagatgaattatgtgcaccgggacctggctgctaggaacattctggtgaacagcaacctggtgtgcaaagtgtctgactttggcctctctcgctacctccaggatgacacctcagaccccacctacaccagctccttgggagggaagatacctgttagatggacagctccagaggccatcgcctaccgcaagtttacgtcagccagcgatgtctggagctacgggattgtcatgtgggaagtaatgtcatttggagagagaccttactgggatatgtccaatcaagatgtcatcaatgccattgagcaggactaccggctgccccctcctatggactgcccagctgccctgcaccagctcatgctggactgttggcagaaggatcgaaatagccggccccgttttgcagagatcgtcaacaccctggacaagatgatccggaacccagctagtctcaagactgtggcaaccatcaccgctgtgccttcccaacccctgcttgaccgctctatcccagacttcacggcctttaccaccgtggatgactggctaagtgccatcaaaatggtccagtacagggacagcttcctcaccgctggcttcacctccctccagctggtcacccagatgacatcagaagacctcctgagaataggggtcaccttggcaggccatcagaagaagattcttagcagcatccactcgatgagggtccagatgaaccagtcaccgtcggtaatggcatgagaactcgatgttcctaggggaggagaggaatgaaaaggaccagggtcaaaggggaaacagaggttgaccacggtggaatgtgccagaaagatcagcttcttggctgagaaacaacttcccacctgtgaagaatgaactggacctgctgcccatgggcaaccgccatttctcggccatggaagtgtgtagaagccgtgggaaaccaaacgcgtaatgattgacgataaagacagagaaaggtgatgctaaacagaagcgaagctgaaaccgtatgcgttgggaaccagggtgaactcagttcccatctgagagggactggagttccccgtctgcaggaagaaaggaaggaggtggagggaagagagggaagccctgggctgtgccatgctctccctcgccaatgacattcttttctttcctccattcgtactcctccctcagagcccctcctccctcccccacatccatttcccttgctcatgactcatgtagggaagtttcttcaaaataaaacccagctcctgagtcaaaacctggtctgagggagagcggttctccatccctcggtcccagagaacagagtgatatttaaaatgccatcgatggtgaggttattggaagaggaaggaccgttagcacacaccatcatggtaaataagtggagcctaagtgtcagcagacatgatgaaagccaagtcaccttgaaggtgacttttctgggaaggtcttaagcatgtaatgtcccttaataggagggaaagggacaatctcagggcagccttgtccaggtagaaatattttgcccccctgtctgttgttggtgaggggtcacaccagccagggagacctctgggaagaagctgccacacacaaggactctggaaggatccacatgtgagcccagccagggtcatacggttcccaacctgaggaaaaggtttttcacacactccttgctttctgctgagataagaaaggtgtcactctgcagagtgtgactttttacaggttaaataaagctgtatatgtctcattgttaaaaaaaaaaaaaaaaaaaaaaaaaaaaaaaaaaaaaaaaa

SEQ ID NO: 1281 - DNA, 3109 bp, Rattus norvegicus
cccgtctgggagctcgcggttcctgtgctgactctcaaagggctgactgaccctcgcacctagcaggtacttctggattgcaagtccagggttctgggccggtgaccctgttttctctacttcctgtctttgaccttgggtaccttccaacccactgttgccatgaagattgcagtaatcggacagagcctgtttggccaggaggtttactgccagctgaggaaggagggccacgaggtggtgggtgtgttcacaatcccagacaaggatgggaaagcagaccccctgggcctggaggctgagaaggatggccgtgccgtgttcaagtttcctcggtggcgtgctcggggacaggctctgcccgaggtggtggccaaataccaggctctgggtgcagagctcaatgtgcttcccttctgcagccagttcatacccatggaggtcattaatgcccccaggcacggctccatcatctaccatccatccctgctacccaggcatcgaggggcttcggccatcaactggaccctcattcatggagataagaaaggaggcttcaccatcttctgggctgatgatggcctggacactggtgaccttctgctgcagaaggagtgtgaggtgcttccagatgacaccgtgagcacgctgtacaatcgtttcctcttcccagagggcatcaaagggatggttcaggctgtgcgactgatcgcagagggtacagccccccgctgcccccagtctgaggaaggagccacctatgagggcattcagaagaaggagacagccaagatcaattgggaccagccagcagaggccattcacaactggatccgtgggaatgacaaggtgccaggtgcctggacagaggcttgtgggcagaagctgacatttttcaactcgacactcaacacttcaggactgtcaacccagggagaagctttacccatcccaggagcccatcgtccaggcgtggtcaccaaagcaggactcatcctctttgggaatgagcatagaatgttgctggtgaagaacatccagctggaagatggcaagatgatgccagcctcccagttcttcaaggggtccgctagcagtgacctggagctgacagaggcggagttggccacggcggaggctgtgcggagctcttggatgcgaatcctgccgaacgtcccagaggtggaagactctacagatttcttcaagtcaggagctgcttctgtagatgttgtgaggctggtggaggaagtgaaggagctgtgtgacgggctggagttagaaaatgaagacgtttacatggccaccacctttagggagtttatccagctcctagtgaggaagctgagaggggaggacgacgagagcgagtgtgtcattaactacgtggaaagggcagtgaacaagctgactctccaaatgccctaccagctcttcataggcggcgagttcgtggacgctgagggctctaagacctacaataccatcaacccaacggatggaagtgtcatctgccaggtgtccctggctcaggtgagcgatgttgacaaggcagtggcagcagcaaaggaagccttcgagaacggactgtggggaaagataaatgctcgtgaccggggccggctcctgtacaggttggcggatgtcatggagcagcaccaggaagagctagccaccattgaggccctggatcgaggtgccgtctacacgctggccctgaagacgcacgtgggcatgtccatccagaccttccggtactttgctggctggtgtgataagatccagggtgccaccatccccatcaaccaggctagacccaaccgcaacctgaccttgaccaagaaggaacctgttggggtctgtggcattgtcatcccctggaactatcccttaatgatgctatcctggaagactgcagcctgcctggcggctgggaacaccgtggtgatcaagcctgcccaggtgaccccactcacagccttgaagtttgccgagctgacactgaaggctggcattcccaagggtgtggtcaacatcctcccaggatctggatccctggttggccagagactctcagaccaccctgatgtgaggaaaatagggttcacaggctccacggaggtggggaaacacatcatgaaaagctgtgctctgagcaacgtgaagaaagtctccctggagctgggtggaaagtcaccccttatcatatttgctgactgcgacctcaacaaggccgtgcagatgggcatgagctccgttttcttcaacaaaggggagaactgcattgcggcaggccggctctttgtggaggagtccatccacaaccagtttgtgcagaaagtggtggaggaggtggagaagatgaaaatcggcaatcccctggagagggacaccaatcatggcccgcagaaccatgaggcccacctgaggaagctagtggagtattgccaacgtggtgtgaaggaaggggccacactggtctgtggtgggaaccaagtcccaaggccaggattcttctttcagccaaccgtcttcacagacgtagaggaccacatgtacatcgctaaggaggagtcctttgggcccatcatgatcatctctcggtttgctgatggggatgtggatgctgtgctgtcccgggccaatgccacagaatttggcctggcctctggggtcttcacccgcgatatcaacaaggccctgtatgtcagtgacaaactgcaggcaggcactgtgttcatcaacacgtataacaagactgatgtggccgcaccttttggaggattcaagcaatctggatttggcaaagacctgggagaggcagccctgaatgagtacctgcggatcaagactgtgacttttgagtactgaagccaagtctgtgatatttctcctgtaccctgttgcctcccctcagggagccctggcccctgtctggtgtcttagcaccctcctgtccccaacactgttcccttcagctgctggagctatcagtgtggacccctgctggtgacaggacacctccggacaattggaagtggttccaagtggagtgagcagtcatgtcccggatgaataaaggttgtgagcagaagtcacctgcaaaaaa

SEQ ID NO: 1282 - DNA, 1675 bp, Rattus norvegicus
cgcgctcggtctcctctggctcctctgcctaagggcccctcgccaccgccaccatggacgccatcaagaagaagatgcagatgctgaagctcgacaaagagaacgccttggatcgagcagagcaggcggaggctgacaagaaggctgcggaagaccggagcaagcagctggaagatgagctggtgtcactgcaaaagaaactcaagggcactgaagatgaactggacaaatactccgaggctctcaaagatgcccaggagaaactggagctggcggagaaaaaggccacagatgctgaagctgacgtagcatctctgaacagacgcatccagctggttgaggaggagttggatcgcgctcaggagcgtctggccacagctctacagaagctggaggaggctgagaaggctgcagatgagagtgagagaggcatgaaagtcattgaaagccgagcccaaaaagatgaagaaaagatggagattcaggagatccagctgaaagaggccaagcacattgctgaagatgctgaccgaaagtatgaagaggtggcccgtaagctggtcatcatcgagagcgatctggagcgtgcggaggagagggctgagctctcggaaggcaaatgtgccgagcttgaagaagagttgaaaacggtgacgaacaacttgaagtcactggaggctcaggctgagaagtactctcagaaagaagacaagtatgaagaggagatcaaggttctctctgacaagctgaaggaggctgagacccgggctgagtttgcagagagatcagtaaccaaattggagaaaagcattgatgacttagaagagaaagtggcacatgccaaagaagaaaaccttagtatgcaccagatgctggaccagactttactggagctaaacaacatgtgaaaccctccttagctgcggccacattctctcgtttccccctgttgttttattttgtctttaaacacatgcttaccatgaaaccccttcaatgctttttttttttatatatatatatacctttaccactgtcactgcaacatctgcagagagccagctagggcagggggtggggaaagacacacagaaagcaggtgtacttgttatttaaatgtgccatttcccaggttgacattgccacacttcacagagtttaggcatgcagtttgcttagccagtgtaggaagcctcacgaaaacaaaaggattaacagcctaagtgccaatggtggggtcatcaggaagactgatgttggagacaatcaggtgcagattggtgctaatttaaacaaaagaacccctggtgtcttttgttcagtctaatacaatttagacttctgtccaacactaatttatttttgtcttgagtagcactgcgagaggatatgggttccatgtgcccgtgttcctcacagccaagggtttgaaagccacgctggtcttgtaagattcccattccttcccagctgacatgcttgtggtcccttccaactcagtggggagagggctcagtgctgttcgccccccccccccccaattctccatgtcagggtaagagatctaggcactacatatgtaattggtaaagaaaaggcattttctcgagagttataactatgtaaacattgtataatgatatgaaataaaatgcacattgtaggacattttcta

SEQ ID NO: 1283 - DNA, 2519 bp, Rattus norvegicus
agagcccgtgaggcggccggaccatcatcgtcctgctaatacagctacttcctcaaccaccggtatgagccacgggaagagaaccgacatgctcccggagatcgccgccgccgtaggtttcctcaccagtctcctgaggactcggggctgcgtgagcgagcagagactcaaggttttcagtagggcgctccaggacgcactgaccgatcattacaaacaccactggtttccagaaaagccatccaagggctccggctatcgctgtatccgcatcaaccacaagatggaccccatcatcagcaaggtggccagccagatcggactcagccagccccagctgcaccagctcctgcccagcgagctgaccctgtgggtcgatccctacgaagtgtcctaccgcatcggggaagatggatccatctgcgtgctgtatgaggaggcgccggtggccacctcctacgggctcctcacctgcaagaaccagatgatgctgggcaggagcagtccatcgaagaactacgtgatgactgtctccagctagagaggagccgccccgccctggcactctactgttctcatgctgccctgacaacaggccaccgtatacctcaacctggggaactgtatttttaaagtgaagagctatttatacatgttatttttttttttaagaaaagaggaggaaaaaaaccaaaagtttttttttaaaaaaacaaaaaagaaaaaacaattcgttaacgggagctgcttggaagtggtctccccaggtgcctttggagagaactgttcttgattgagtctatgagccagtgtttgcctaggggagtgggttggggattggcctagccaaggtaaaaggggattcttggctgatcccccaggaggtggtggaagggagcaaggttagcaactgtgaacgagaggggtcagggtctgctctgggttaccgttcccgctgggatgcctgtattcctggtccctctcttactcaggggcattcaagcctggtctcaaataatactacattgcctaatcttctcttttgtttttctgctgagatcctgggcacacggaaaggcctctcctgtcccttccgtctgagcagagtttcttgaaactgtgtctcgtttctgatcctaccctcggggtcctgaagaggtggtttcccggcctagaatctatctaaacgtttttggagggtgggctataaggcagatataatggaggggaaccgcacaaaccctttgctttgctctgtgctgctttgtatggatggatggttaataacttagggatgatttgcaatggaattttgggacccaaagagtatccaatgggggtgggtgttttggacctaagccctccttttgggaaccacgtgacagtctgaatgctgctaccattattcctttgagaggtggctcaaagctccagggaactccaggtcctttcttactgccttctcttcaagagcaacctcccccatttcttttccctctttcctgcggttgggtcctggagggccccatttcctaggacaagagttctcaatcactgtgcaatagtcccaggaagctctggaactgggcctcccagcccctcctgattcctggtgggttttaggaccccgccttccccgttcttctgactggctggtgggccttgaggagatctccctcggccgcagggagggcacctgtgcactgcaggactacctggtactcctgtggggctgccacggagagccaaaccttaggcatagctttgtctcctcggtgctcagagcacctgcagggggaggttgcccccctcagtaaaaatccaaatttatttgtagatgtgtgcaatatttactgttctgggttggagaaaatcgggaaacactgggaagaagtggccttccttcaggttcagtgacactgatgagggcttctcagaaggcctcgagtctctcaaaccaaaggacagagctagagccagccagtcacccttagtgaggatccccttccccatgtctctccactgccgtggcatcccatgtcctggatttctcaattcctcagtttctactcaaaggtgctacttaccaaacactctgcccgtcccgctctccccagcttcgcacagccgtcccaggtggcttcgtctctcctgctttaaagttaactttgggcccacagacccgagagctgtgggttgaagcaaagctgtgaatcgctccagatggtccctgtgttctgtccacacacaggtccccgcctttttagaagcagcctcctggtctcatgcttaaatctgttcctcactgcccgtgttcactttagaaatggcagaaccacagagctggactgttgagcaggcctgtctctctcattaaatagaaataagtaagtttgtaagctattccgacagaagagacaaaggttactgattgtacaatagcgcttttatatggaagactgtacagctttatggacaaatgtaaaacttttttgtttttaataaaaatgtagcagacc

SEQ ID NO: 1284 - DNA, 923 bp, Rattus norvegicus
gggactcttttctttcagactgaccgcggggcagctgcggagcatgtcgaccccggcccgtaggaggctcatgcgggatttcaagcgattgcaagaggacccacctgtgggggtcagtggtgcaccatctgaaaacaacatcatgcagtggaacgcagttatatttggaccagaagggacaccctttgaagatggtacttttaaactagtaatagaattttctgaagaatatccaaataaaccaccaaccgttaggtttttatccaaaatgtttcatccaaatgtgtatgctgacggcagcatatgcttagacatcctgcagaaccgatggagccccacgtacgacgtctcctccatcttaacttcaattcagtctctgttggatgagccgaatccaaacagtccggccaatagccaagcagcacagctttatcaggaaaacaaacgggagtatgagaagagggtttcggccattgttgagcagagctggaatgactcataatagacacctggtctgtccacctttccatcgtcgttgtgtataatttacctcccagtaggaaggctagcaagttttaagtgccacgggttttaaggattctgcagagaaaaaagaaaaagtccttcagtttagaacctacaaaagcttgtgtatcttgattaatgtactttttattgcatggtgtgaactaagttattgctgcataaatttgtaatatatcctgtttgtatttttttccaagtgtataatgttggtgtggagttttcatgacagaatatacacattttgtaaatctgtacttttttcaaatattgaatgccttatttttgaattctttagatttttaaattggagaaaagcacttaaagttttttatatatgaatattacatgtaaagctgttaaaatacataacttcagtg

SEQ ID NO: 1285 - DNA, 1893 bp, Rattus norvegicus
tgtctcactcagcgagacgcgcggtgcacggtgcttccccggcggacgaccgaccaacccgcgctccggcagagtccttggcgctcgcctgccggcgggacagacagcccgcctctagccgctctctggaccctggccgccccgagcgaagactggagcaaaatgatgcttcaacatccaggccaggtctctgcctcagaagtcagcgcgaccgccatcgtcccctgcctctcacctcctgggtcactggtgtttgaggattttgctaacctgacaccttttgtcaaggaagagctgagattcgccatccagaacaagcacctttgccatcggatgtcctctgcgctggagtcagtcaccatcaacaacagacctctggagatgtcagtcaccaagtctgaggtggcccctgaagaagatgagagaaaaaggaggcggcgggaaagaaacaaaattgctgctgccaagtgtcgaaacaagaaaaaagagaagacagagtgcctgcagaaggagtcagagaaactggagagtgtgaatgccgaactgaaggcccagatcgaggagctgaagaatgagaagcagcatctgatttacatgctcaacctgcaccggcccacgtgtatcgtccgggctcagaacgggcggacgccggaagacgagaggaacctttttatccaacagataaaagaaggaacattgcagagctaagcagaggtggcatgggggcaattggggagtccttactgaatcctccttttccaccccaaaccctgaagccattggaaaactggcttcctgtgcacttctagaatctcagcagccacgagctgttgggtcaggagggcctgcggtgactactgcgttgtcccactctgtccccgagtgaaccgtggagcaggcaggagcatcctttgtctcaccggctccaggatttaggccttaccatcccggccattctcagatgacctagctggccccaggctggggtcccatgcaaagcaggatcgcactaatgggatgcaggcagaagtgtctaccttgacaggtggggtggaccacgtcctccactgcggctgacaacatccctcctagggaagatggagtgagaacattcatcattgaagttgtccaatggccagggtatgctttctagaaactatgctgttctgtcctagactgactgtgcatagggcattcatttctgagcctggtgttgtgctatttagatgtttgtcttgcacaacattggcgtgatttttttccgggagtttcatcagacctgatttccgagagtttgggggtctgccactgtggacaatatcccccaaaagtgtttgggtggccatgtaaactggctgatgaccagctgtgctactctgtgctgaccgaggactgatgcctccttcccctgtacccactgctgaggaagaacccgggcacagcagctgtccttggctacaaactgttacaatgtcacagaacgaaggcacaaagtcccgctttcaaagggcgtaggactccacactcagtgacagggcaggaagagccaaggattctccgttttcccttccttcccaccaaaaaccacagcccgtggagactggtatttgaagccaggagtggggcaaggaaggtgtctgcactgtgggatgttaactgcgcttttgtcttgaagctattttgagatgcggtccagagtatttcagctgggaggtccctcccactggccaccagggctctggctactgttaaaattctgatgtttctgtgaaatcctcagtgttcaatccagactcagtagtatattacagttttctgtaagagagaacgttacttatttatcccagtattcctagcctgtcaacgtaataaaatatcagaatgagacctggt

SEQ ID NO: 1286 - DNA, 3662 bp, Rattus norvegicus
agacctgccgggcgcatatttattcacagttttgtcccatgttaagtcggttagcatagtgaatctgagtgcatagtatgtcatttcattccgttgagtttctcgagtgttttctttaaatgtctgcagagtcgctacccttccttgaactatgaagcactgcaatcttcttaattctcagtatgaagagagatttttgagctttaagtctgaggggaactcagcaggcctggttggcgtctgcaatgaacatcaagaaaccatcgtgctgtgggaatgtgatcgtttttctccctttttgagagatctttccttttgatgccagttttcttccttgtttacacaagttcaacaatttgaaaggaaaaggcaattgtaagggttttaaaatggcagagaaatttgaaagtctcatgaacattcatggctttgatctgggttccaggtacatggacttaaaaccattgggctgtggaggcaatggcttggttttttctgctgtagacaatgactgtgacaaaagagtagccatcaagaaaattgtcctcaccgatccccagagtgtcaaacatgccctccgtgaaatcaaaattattagaagacttgaccacgataacattgtgaaagtgtttgaaattcttggtcccagtggaagccagctgacagacgatgtgggctctctaacagagctgaatagcgtctacattgttcaggagtacatggagacagacttggcgaacgtgctggagcagggccctttactggaggagcatgccaggctcttcatgtaccagctgctgcgtgggctcaagtacatccactctgcaaacgtgctgcacagggatctcaagccggccaaccttttcattaacactgaagacttggtgctgaagattggtgactttggcctggcccggatcatggatcctcattattcccataagggtcatctttctgaaggattggttaccaaatggtacagatctccacggcttttactttctcctaataactatactaaagccattgacatgtgggctgcaggctgcatctttgctgaaatgctgactggtaaaaccctctttgcaggtgcacatgaacttgaacagatgcagctgatcttggagtctatccctgttgtgcacgaggaagatcggcaggagcttctcagcgtgattccagtttacattagaaacgacatgactgagccacacaaaccgctgactcagctgcttccggggattagtcgggaagcactggatttcctggaacagattctgacgttcagtcccatggaccggctgacagccgaggaagcactttcccatccttacatgagcatctactctttcccaacggacgagcctatttccagccatcctttccacatagaagacgaagtggacgacattttgctaatggatgaaacacacagtcacatttataactgggaaaggtaccacgattgtcagttctcggagcatgactggcctattcataacaactttgatatcgatgaggttcagcttgacccgagagctctgtctgatgtcaccgatgaagaagaagttcaagttgatcctcgaaagtacttggatggagaccgagagaagtatctggaggatcccgccttcgacaccagctactctgctgagccttgctggcagtacccagatcaccacgagaacaagtactgtgatctggagtgtagccacacctgtaactacaaaacaaggtcgccatcatacttagataacctggtgtggagggagagcgaggttaaccattactatgagcccaagcttattatagatctttccaactggaaagagcaaagtaaggacaaatccgacaagagaggcaagtccaagtgtgagaggaacgggttggtcaagcgcagattgcgcttgaggaagcgtcccagcagctggctgagagggagaggggccaaggctttgactttgatgccttcatcgcaggcaccgttcagctcagtgcccagcgtgagtctgctgacgtagttgacaagttaaacgacttgaatagctcagtgtcccagctagaaatgaaaagcctgatatccaagtcagtcagccgagaaaagcaagaaaagggaagggctaacctggcccagctgggagccttgtaccagccctcctgggagagccagtttgtgagtggcggggaggagtgcttccttatcagtcagttttgttgtgaggtcaggaaggacgaacacgtggagaaggagaacacttacaccagctatttggacaagttttttagcaggaaggaggattctgaaatgctagaaactgagccagtggaagaagggaagcgtggggagagaggccgtgaggcagggcttctgagcagcggtggggagtttctcctgagcaggcagctagagtccataggcaccccgcagttccacagtccagggggatccccactcaagtccatccaggccacgttaacaccttccgctatgaaatcttcccctcaaatccctcacaagacatacagcaacattctgaaacatctgaactaaacactcagcagacacttcttttgttcttcatgaaatgtgttgtgtcttttttatcactaatgttttaagtcattttttttttacttgaatcagaaggtgtcattaatttgcaaggatttttcttggttctcagtttgtaaaacacagagttttttctacatgtgagttagttttcatttgaactggcatgtcgtttgcacacacacaaagaatagagcaaaacaatgcagtgcaggaggagacaagatgcgctaggatggacagacattctcacagaccagtgacctgcttacaggaaacaaaaccttgccttgaaacttacacagtgagactgtacataattgcatgaaaagatctatttttttcctgaaacatttttcattcattagtattttcaagtttttcatactgtacacatttcttaagacacatgataccagcagcaactgaaaacgaatgccgaatttggtacacatgtgttatctacctcaaggtaacaaaagtatgcgggcgaaacctaacccacccatagtcgtccgcggcatatgcacttgtatctagccagcgttggccgcagtaaccaatgagactcgtccgccatttatcaatgtcctggtgttcatcctttacagtgaagtgttagatacatcacatcttatttatttttagcaaatcagtatattttctgtatttaattataaaaggtaacttagtttaagtttatttgcaactgcccttcttcccgtttggcactatggtttgttgcctgccgagctgatctgagaagtcagcttgtcccgaggctgtccatgtacgttaagtaaagtgctcactgtgtataggaatctgtattttggaggtgcttgatctatctacaaagaaaaaaattaggaatttattataaaatgctcctagaagtcttaatggtgtttattttttaaaaccttgtaatgttagacttgtgtgcatggaagtgattaaggtacatcattattgtagtttgaacattgtacatgataagccttcccccacccccgtttttactgtatgtttttattgaatgatctattccccatccctaggcaagcatgaataaaattaggttaaatgt

SEQ ID NO: 1287 - DNA, 19080 bp, Rattus norvegicus
  misc_feature (1)..(19080): n = a or c or g or t
tcaacggatctcactcttgactgtccagtgccagcaccttagcaaactcccccagcttggaggcagtggcccaccacatcatggaggtgtcgtctgagcacaggttccggaagactgtcaaagtctgccttaataggcaggggtactcaggggtagcaaactgagaagagaccacaggccaaggtgtgggaggtgaaccagtctctacccaccagccacttcatcagaggcaccaagtgagcctctaaaacggaaggtgggtgctcatgtgagatgccccacacggactttactactgtctcttccactgtggccagtgactcaagaggtggcagcagacagtgtcacatactcaggacctcccaccaaagtgtgaggctcccagctattcagccaaggccaagaggaccttggtgtcacagatggcatctgtaaggaagggcaggagctaacttctggttcattcaatgacaaaggcaaaggccatggtggagagcatcttgatacagttgagacagagctgagtgtcctcatcacacagttcatctatgagcaccatggtggggtagagcgaatcgttgccgttgacagctgctgtcttggctccttggcatttctttttaaaaagaagagaaaaaggtcagcagtctgttttacttatgtttgtttgtaaatacacacactgtactagaagcatgaaattcagaaagaagctgacagtaagatggatagggaggttggttactgactgtgtattcaccttaaatctctgagggaatgtggagccagcaatgactgtgtgtttgtgtctccaagcctagcccacaggttagcttacattggtgtgaggaacacagtattgtataacaccatacaaaagtgagcagagacagggcccatgaaatcacaagtagaaagtgtttgttactgttccacctggtcacccaaccaggtgtcctgtgtgtctaaaagccacacagaaagacaaaatggagtatgtttggggtggggcgaagagagtgaggtattggcagcccacgtgcgaaggggattgaaggaaacatgggtaagattggatacaagttgggttttcagctgtttgaagaattggcttgtagaggaaaggacactatattgtgcactgtcttaggaataagacacaggaggccgttgtatggaggaaaatgcaggggcttcacgagagtgagcaaagacctgctagaggtcttctgagtccccatgctctctgtgtgtttatatatgcatatacatagcatattaatgtattaataaattacatatataataagacaagatatattatgtatatgtggtgtttgaatatgcttggaccagggagtggcactatcaggaagtgtgaccttgttggaagaaatgtgtcactggttgtgaactttgagaccctcctcctagctgtctggaagacagtcttctcctggctaccttggatcaagatgtagagctctcagctccttctccagcaccaggtcttcctggatgctgccatgctcctcccttgatggtaatggactgaacctttgaacctgtaagccagccccaattaaatggtgtcctttgtaagagttgccttggtcatggtgtctcttcccagcaataagaccctaagtaagacagaatatattaactatttatctattcagatgctgtgacaggttaaaccattctctctgatagggagaactcagctattggtaattttagtataatttaattgaattttttagacaggatcttacatatctcaagccggcttcaaactcttatatagccaaagatgatcttgacatctggattctcttgcctttgccccctgagacctgggtttcagcatgcgccatcacaactggagtatgtggttctgggaattgtaccaagatcctcatgcagccttaggtaagcctaccaactaagctttgtccctgggcctcattggtaatatttagaattaccaagtagttcttttggttagccattgactggttctacagaaatcacagctgtgaagtaataattggggtcagggtgattgtagaagaaatcttgatttgaagccgattcttttggccaattgtcttggggctcattagcttacattcatagataaaggctgtgataaaggctgtgactgggaagtttcgaaatgaaattcagaaagcgtggcccgtctgcagcatgaggaaagctaaagatggcttaaggaacatcatctttctccaggcacgtgctaagcagtctaggactgagtagccactgtcctttctcctgggaaatcccagatgggaaggatcaacccacaaagcatttctggcctcacggatgcccaagaaaaggtgctaaggaaactttctcaacccttggcagattcaaccacttatgattttattagccatggcttcgtcatgtggttgacttgatgtacccttaaagaagtgctgcctagagactggttcttagtgtgggtcacgggactctgctcatgcccacttctactttcttttcttggtaactgaagctgcctggtcgcatgctgagctcactgagccggctaatggcagggctgtaggatgtgcaggaagggcaccaggtagacagtcagatgcaaagacatttgggcagccagagatgctgagcaaagcttaaagagaaaaaatagatcaccacaaagctctttgtctcactccagccctcttccccacgaccacagagggaagaagccaagcctgagtcctccgtcacagctgcacatgtcccgtgactcagcacctcgctcgaggctaatgtggagtctttagggtaaggaagtgggtggtcctagtctgctctgcatggtcaggtcactcactcggcattgataaactcagagctgggtttggggatttcaagagcggcaaggtcagaaggtcaaagcctggaagagtccgcagatgaagataagcaaggagcttccggttccaggtctccaggggaagccgactgaggcttcaaccataagatggacttcgggagatataactagtatttctttgtgtggttctgaggacagaattgagctcagggtcagcccttacagagcagggagctccatcaaaaatggctttcctaaagaatgaattgcttgcaagggaggtagccagttctcaggttgggagcatccaaaaataaaagcaggaaaacctggcggggaccctgagagacaagtaggaagaggatcttgggtgaagggcagagtggtggccttctgcagtttccctagaatactgaaatcctagggcttgagagatgaggtagttggtaagacagaagcatgaggatctgaattggatccctggtacctgtgtacaacatggcccatactcataaaccagagctgggagggtagagttgggatcctacagattgttgggcagctggtgagttccataccagtaagcgagcctgcctaaggtacaaacagttggatggtgtaacatctgaggtcatcctgtggtctcacacatgcacgtgtatgcatttgcgcgcgcgcgcgcgcacgcacgcacacacacacacacaaatcaagaagtgcattcaagatttgtgtcagtttgcttaaagctgaattcccaagcttacaaggtttgggaacaggagaaaagtgaccacttgtaattgtgtcggggacatccttatctccctctccccagatctccctctgctaaggcatatctccctgcctgattaccaaaggacgacttttatagacactgctattgtaccctgtccctactacacacaacgggagggagctgctgatcaaaaaaagttacaaggacatcagtgtccatggaaaatgtagctgttactgataattctttctttttatttttctttataaagaaaacaaagagaagtttcggggggaggggcattcctccaagtttctgttgactctgcttttctggttagttatcttcccaaacttggcactgaaccagattaggctaaagaaagtcttagagagggctcatttcagattcatctgccccagactgaagaaactaaggccagagggcagagtggtttgtctaaaggcactggatgcctcggggcacagctgggactgaagccagccttagcccacttctgaccaagcctagacatttccagtaggctgccttttgggaaaggaccaaatcaccatagcctctgggccttggacaaatggaaatctggcctcatggctgttcctttaaagatgtgagagggaagctcggccctcgaccacacgtttctccttcaagccagttttcttttatttacatcgttttcaaggtctgccgcccaaactgcgcgctgcctacatgggttcctcgctattgcctgactcttgatacacaaatgttccagggtccagagtgggaagcttggcttctcccccaagaagtagcatggtggggggcttctaggttgtttctcctttccagagatgcctgtaacagatgtttctgctcttagccaaaagcagctaggaatcctcttagcacctctggacacagctacttaatcagcagggctccatggagaacttccactatagcttcttgttcaggaaccaatgtgaaggccaagtgtgagacaagtagtttttgtctaaaaatttgtattattatatattaattatacacaatgagtatatatatatatatgtgtgtgtgtgtgtatatatattcagcctccccccccatttccctttctcctcccataatctcttctctctgttcctctcatgaatttctttagggttgctcacaggagcatggagaggagggttattcacaggaacatggacacttaccagggactatactactgaagacagttgggtagtgtacttgaaaataggtgtgaggttcctaggtccagtgccagtgaagcccaccctgcctgactgggttccaagtgggtaagaaccatgtttaggttttatgcatctcagagacaggggaggccttctacgttatctcattcttttttttttttttttttttttttggttctttttttcggagctggggaccgaacccagggccttgtgcttcctaggtaagcgctctaccactgaactaaatccccagccccggttatctcattcttaacccgtttctgattccttcatctgtctgccaagggaccggcagcccagtgcagcatttagggagccaggtacttcatgtatgctcttccctagcaagatgcctgtaccatcttcagtttcttttactcttccattaaaataggaacaaagaaaaggagtgcagtaatgggttaatgtgaaagatgaacgtgggcgtcgggcggtgaaatcctgaacctgtttggggctaggagcggtccagagtagagtgtggattcctcttcccttaaggctcttctgttggggcctgctgagcccttaggtacctagcagagaatagaacagccatcaatctagctaggggccctcaggcaaccagcgcggtcatttgtgatgcccctgcgccccctggtgcccccgctgggctgtgcgcctctcgtcccctcccgacccccccaccaggcttccagaaagctcctagtgcattccccggcattctctggcgtgagtcacgcaggtttgcagccagccaaagggggtgtacttgagcagagcgctataaatagggcgcttccccggtgctcaccacccgcgtcaccaggaggagcgcactggagccaagccgcagacgggtgagacagctgcaccttttctaccccaacaccgaaggcacaccggcagggatgggagggcaagggtaggagccaggtagagagctgccgtgggtaagtgggaggtgctagagccccatcaccaggcagtcgagcttggggtagggggtgcacgctggctcagattcaggagccacccccccgcccctgttctttaacccgcatcacaattccaaggctgttcaataggccacatgcaaagatcttccttttgcaaaaatggggaaactgagacgtgaagcctgcagtgagatgcggatcgcgagggcgctagtnntgaacgccgcgagtaggtgcggatctctgtagtggctgttgtcttaccggcatgagtcattgcatttggaccttccctccagctcctgggacagcgcataataaataagatgttgtgtatttaaaaggacgtgctgcagccatcgagacctgctttactgaacagaatgcatgcattcagttctttagagaaatgcttccccaggcctgagatgtcnnnnctaccggatcattttatagatggtaatctgaggactggagacgataagaggttcagcctccaaacgttctatgaatgagaaactgaagccctttggctttccagaatttctagacccagttttaaaaaacggtgctggtgctgtttttaaaggacaaagttaggaattcaagagttcatacaagttctctaacaggaaggtcttgggacaataccatttagtgcctgaccttgtgagaataagaaaacaaaccacaaatggtagttggtggaatattaggcagcagcaaatgtgtgactttaaaaatatttgaaaacaggacctatgatggcattgtttataaaaatgcattgaaagaaaaggagaaaatatgccacaatggaagagactgtgttttcttactagataaggtggtccttgcgctggtggggctgttgtaccagggtagttggcagccaggcagtaggccagcctccaaatgatgacaggaagtgagtcagtgtagaggaanaggcangcnngntgagctgtgttgtcctcggaccaacagcaccacagcacctagaagcttgggagacaaacagattctgaccagagacagtattactggcagacctcaggggagtctattcttagatttacagaatagaggatcgcttctttgagatatcaggcccattttacagataaagaaacagaagctgtgagacttttgttgtcaaggaaataacctgggaggcgaatgacttttgttgtcaaagaaagaatattaaaatgaggttttggagggctgcattctttcctggggtgaccactggcttgcagtgtgtcttgagaagcccaacaggtgtcttagaagtgctgaggctgtctctctagaccccaggctccttacagctcatcttgctactgcttcccctcccattcagtgaccttccttgctgcctgcttcctcttctgggcattgtactgtcctcacatcagaagttatttccaaggcagttaaatggtttttccaaaaatggtcacacttaaggcctctcccacctacagatatctctgtggctttgtctctgatgtggcaaggggtctgtccctgcctggggcatttcaggcctcagtgagcacctgggaggtctatgagatcagggccatcctggtggatcatgaaccagggcgccagccacccaccatctctgggaaagtgcttgtctcttctcccacaccactcctctgctctgtgtgcataattatgcctcaggaaagccttgcctattaatgatctgcccagtgtcctgatgggcctgcctagctgggagcaggttttaagagcaaggcatttcaggaagacagatcgctcccctttccctgttcttgtggctgtaggaagctggtgagcccagataagccattctgggcagggttagagatgcaagatgggtgtgtgtgtgtgbtgtgtgtgtgtgtgtgtgtctctttatgcaaccaatccagcttctgggaaaggatccattgtgtaatactgggcttcggcctgtgtccctggctcaggcagccggcccagtggtggctggggcaccttggcagagcatgctagttcaggcttagagggagcaggcatgtgaaagggatttgctggagccaatgggcttgtcctcctgaaggggctttcctgggggctcactgctaatctctggctttgtccttcccttttctagtgctgccttctctacagtcctaaacagtccctcccttccctttttgattttacccaactcccctccccagtccatactcagcctggcacaagcttcacccagagatggtgcattgggttgaatttcctgtgctgatggaagggcgtgcatattaccacggactcctgaaaagcacacttagacagcctcgggaggctgtaccgtaaggggagcccaggactgtgttgtgagtgaggttcagtcccatggaagggattggcgccagccacccaccatctctgggaaagtgcttgtctcttctcccacaccactcctctgctctgtgtgcataattatgcctcaggaaagccttgcctattctgcctcggggatttatgggaagaaaggactctgcttggagcttgtcccttccaactccagatagcctgggtcctctgtgcggctgaaccatggttcttcccagggccccactgcttccattgtcttttgaaggcatgaatttaatcttgtttttgtccccacgttcttcagaagtaaactgcagtgatgccagatggggaaacagatgagggccatgagttccaatcccatcccacctcccctctcaggagcagaaaacccctaagctgcccagaggttaccatgacattctgctgttctttgcaggactccagactccaaagaggccacaccatgaagattctcctgctgtgtgtggcactgctgctgacctgggacaatggcatggtcctgggagagcaggagttctctgacaatgagctccaaggtagactaaactgctgtccctctggtgggtctggcagagccacccctcaaagttcagtccctaagtgctgagggctgtttgcatactgcacctgggactgtccatgtcctctgcactctcagagtctctaagctctagctcttgccttggtgtttttgtggtcagatgccttctagacattggcctctgtctcaagcttctctgttggctgcatgccatacctttgtttcctctaggtccccttacctggctctcctattcttctctcaaagctgtgtccggaccctttgaaagtttgtcagtctcccctttgtgtgacaaccagagttcttaccaatgtgtctccaagctgatttccccctggaaaccttgctctaccagtttccttctctggaaaagggcagcacagttcaacatgaagtagtcaactgagagcgttctctcccttcctccccatcttctaatgcttttctggaaacccgcctttccttccctccttctctcctaatctccgctcatagctgaccagttctgtgagaatttcattaaaaataatatgatctgactctctgatatggatatgcttggtgaaatgactgctgtggtcaagcgcttagctgcccatcacctcaacttattgttgggttcagacacgtgagatgcattattcacttagtgcacgtttttttttttttttttttggagctgggaccgaacccagggccttgctgtgctaggcaaggttctaccactgagctaaatccccaacccgacttagcgcacttcaagggtagaacacattgatcaaccacgagctctgcttggaccgtggaccttcaggcttagtcatgcattgagactcttgcccttgctcggcagccccccccgcccccatgcccttctgtttggaagtgtttggcagtggcatcaggtagaacacagcagaggtgtgggaaatggcacttgacacaggataagtaagtggtaccccgtgacataatgtgtcactgccttgtcaccagggctgagtcttggttacggtctctatggtgaatgcagctcttcatttatctccccgtctccatggtgtttggtgccaagtcactcatcttccggtcaccatcacctgacactgtgcattgcagcaaagaagtgccaagactgggttaacctgaatgtcacaaagatcgtgtccaaaatggcacttttattatattttgatgcttaggttaactatcttttttttctgtatttccttgaaatatcctctgtggctgttggctccccagggtggcatggtggggtcagtcatacatagtatggctgccctctttgcaccactcctgtgcttctgagctgtgacgcagggtctaccatggaccctttgatgagaccaagggacaggactgaggccacaggactgccacaggctgggggtagtagtgacagcatctcacgttgacagcctccagcactcccatcagagcatggctttctcaccgtcccgccggcttccaggctatttctccagccatttcttcccttctcaactcactgtaccttcctgtctctcacagaactgtccactcaaggaagtaggtatgttaataaggagattcagaacgccgtccagggggtgaagcacataaagaccctcatagaaaaaaccaacgcagagcgcaagtccctgctcaacagtttagaggaagccaagaagaagaaagaggtaggcccagccttgactgagccctggctctccctgctggaacacggtggcaggtgccttgctgggttgccatgtgtcctggtgcagtctttgcagggctttgctaatactgggccagactaaggagccaggaaaagcacattcgcttgtggagcctcagggctgaggtcttggatctggtttccttgcaagtctgcccaggcctgaagccaagattcatttcaataggtttttctaacccttgctgtgtgcagggcatggtgcaggactcgggagaggggtcatggcagcacctggccacttcccaccactcttttcttctgtattcaaagtggctcttaacatgaatgtgcttatttttaacatgaatggcaatattttaaagttaacgtaaaatcctcatgatctatccttagacatccattcatccccactcagcttcgggtgtggggttggggaccgttttcaaagcccttagcagaggctgaggttatgggtagaaccaggccctctatagattgtccctacctgtgataatgcttactttataaattacagacagtagggtaggagcagcaacgatgacgtagaatagttacaatgttacaccaaacaaaaggttatgcagatgcaatttctcccactctcagaatatctcagttcctcagcctcagcaacactatttttagactgtggttgaccatgggtagctgagaactgataacaggggactgccctgttaccatttgtttaacttgccttttctacatgtggacgtctatgttgaccctggtacacacacacacacacacacacacacacacacacacacacacacacacgaacacacatactagaacttatacacagatccatccactcatttattttccatatctttatgtagacgtacacatttgctgtaaactaatatctcttcaggtggagaatttaaattttttattttggtgatccctggagccaataattgggtcagggggcatggtaatgaggttgtggtcgatttgacttcaggttggatagctttgatttgcacatcaggggccacggttctaatagaaagagaagactggcctctttggggagatgagaagagacagtgaggtggcataagggagagatgggtcctgaagaagagacagtcagagcagcaaatcagagcggacagggaaaacttagagaacagctgggccttgaaggatgagaggcccctgtgagcggtgtggggacgccatgacggatgggctagagcaaagctgtgggctgagtagcaccttgtacacagatgggagagatcggctgggtctctgtgtgggtcacctcaccttgtcatctccatgaagggtgctctagatgacaccagggattctgaaatgaagctgaaggctttcccggaagtgtgtaacgagaccatgatggccctctgggaagagtgtaagccctgcctgaagcacacctgcatgaagttctacgcacgcgtctgcaggagcggctcggggctggttggtcgccaggtgagaaggagacatgtccatggcctgggttctggatggggagtgtggagaatccacgaaataggcctcactccatatactgggtacagttgattagcgttgcttgactgcatgcctttctagtgtcgtggtcgattggtgatgtctgacacgagtacacatgtagccaatcatcatgggtatgcatgacagtcttacaagacctttaaccagctgggtaaaatggcctcatggtatggtagaaccccatgctcatataggaaaggggggctaagaatatttagtatatttgcatcaattctatccctacctgtgagcttcactggttgggactcagtgaaactcactgtttcctgaaggctgagcagccaagtgggagccgctgtccttcatgaccaaagatgagccctctgagtttcaccgtgagaggtggctgcagggcctgacagggtattcaggaggcagaacagcgggaacttgggtgagctgctgtgtggtcacagggtgaggcaggctggggtgcacaaggccttactgtacttctctgggtcccagctagaggagtttctgaaccagagctcacccttctacttctggatgaacggggaccgcatcgactccctgctggagagtgaccggcagcagagccaagtcctagatgctatgcaggacagcttcactcgggcgtctggcatcatagatacgcttttccaggaccggttcttcacccatgagccccaggacatccaccatttctcccccatgggcttcccacacaagcggcctcatttcttgtaccccaagtcccgcttggtccgcagcctcatgcctctctcccactacgggcctctgagcttccacaacatgttccagcctttctttgatatgatacaccaggctcaacaggccatggacgtccagctccatagcccagctttacagttcccggatgtggatttcttaaaaggtcagaaagcattcgttgtctttccaagacggaatgggagtctccaagatgtttaggctctgctagggcttgacatgtgttttatgttcccagcagcccctgaggctggtattttcccccatttgcagggtaaaggagcatggatgggggtaaagcaatgcagaaggcaaactgggacccagttcaatctcacacttgtagagcttggagcctgtgttctttacagccagctcagggtgtgatccagctgtacctcctctaggaccctggcttttctttcttgggaacttttgaggatgtggtgttggaggcctgcctttccaggcaacaggtctgcgtcatcttaaagaagatggtcatgactgcggcctaagcatgtaacacctgtaagatgaaatgtgatgtggacacgagaaacccgtgtctgaggagtgattttcttcatcagtgtgtgtcctaatgccgtgtccttcacgtatggtttgcacgagaaacataggaaggcctggcacccaattcacgtctcttgtagctctgttatctaaggatggtgtatgttgtcaggacacacttgtgctttctggggcttgatggccagttagggagtaccgccagccaaggagaatgaagaacagccacgatgccagaaggcacacagctgagggaatgtgtgagatctctcagagggagatggtgagaaggcaggcagtacctcgtaagagccatgggaatatggctagggagccccagggaaatcgcatgtctgcaagcgaacgactaagcttcgtcttgcctgaccacagcgctgagcagaggtgtggggactcgggggtgggtgtctttccaatgtgacacgtgcctcattctgcgcccctttctcctcatgtgtccagaaggtgaagatgacccgacagtgtgcaaggagatccgccataactccacaggatgcctgaagatgaagggccagtgtgagaagtgccaagagatcttgtctgtgggtgagtcgggaaccagtctataatctgggcatctgactaagggtcaccagtgactaactggtactgtccttcagagactagttctctgcctgtgatctgtagtccctgggagactcctccctggtgcatagcttactatgctcatacctacagcttcgttatttgggagctggggtagaacccgtgcctcatgcatgctgggtgagtgctctaccgttgagccacgccaattttacttagaatcaaatccaggggcagatttttctcaagtagatgaggtctgtctaaagcacccacacaccctggtggctcatggcaaacctgcaacccgcggtggatatctccatagaatttaaccgtagccaccagcaatctgcagctcattcccctggttgctttgttccacagtgccaagtacagtagaccctgctttttaactttagattatgaaatctttgacagcatgcattttgtttaatcagtgttccacatgcctggcactgttgcgaacatgtcacaggtgtttgttctcagaatgatcttgtgagcctggttcagctttctttacattttgcagaatggctacatgacttatctaagattacatgacatgagacatctcacttaggctgtgctcaggaacagcctgctggggtttctccctgggaaccctgagctatgtccttgcgatggtggtccttgatatcctggccacattccttttggttgattagtccctcagaaaggaactgttttccttcatcggcttcccaggcagtctgggtatggcggcggcacatccctatagtaccaacatctgggaggctgaggaaggagggtggtgaatctgaggccagtcttggctgcatagcaaggttctgtctcagtgaaaacaaagtacagcaaacccagaaccgttccccacagatttgtcaggtctggcggtcaatcaaatgtttctgctttcagtccggtcttcacagtggctcacggtatacagcgcttcctgctcagatcacaaggagttaatcgtcctctttgttgttttgtcatatgtgtagttggcagggacagacgttcagagtctggttaaatattcccagcctcactcctgcaatgttaggagcccaggaaagatacattactgctttcaaaggttatagtgtgaaattataaacaaatatgtacccacaccagcaggccgacccccaggaaaccgtcagggatctcttccatcaggcttagtgaccctctcaacagtcaccgtttctgtcacctgctagctcctgtgtacggtgcttacaatgacagggaggctccacagggacctctcatctgggacaacttgactcagcctgcgggtggacccgaacatggctgagcatttaacgtttttggcttctacctgccatgtgccaagtgacaatcagaaatatcttcagaacgtgtggaatgtccctggtgggtagtgtggtcccaggttgagaaccacagttctacaccactggtcccctccaggactcttccttgtttgggctaagagtaagggtactcaggctattcctcaaagatttcttctcatctgtgctgcttgtctttaatcctctttcttgccccatgcaacattttatcttatttagtatgaatgattgcagctgtcacgtggggcacagaggctcccttgtcttgcttagttttgatacacagactctcctagatgttttaaaaatagtagaggagggggttttcagaaaaaatggttttcagaaaacatgggcattttgtaggacccagatgcctgatacctgcaatgtactcatggaccagagggaagacaccagttttcctgttttctgtaggagccttcctggccagctgtgggtggacaagggcaggcaaggaccgaccctcagcaccggatgcctgtgttttgtagcctaggaacctggctgtctcttctgcagcttgggttctgggaaaatggtattgtggaaatttctcaaatatgttccaaaataagcttggagaatgttctagaaccatggtctcaggggaggaagagctcaggttgaggagctgaagatgcgggttcagtcctggttccagagattgcttcccctctagatctgggcaagttccttacttccaaaaccctgtttcatgactggtaaatcaggagtgttgatgcttgtgtcaagcccagcatactttgaggcacacagtaggtccacctaagggaataatgctcctcttctctgtggagtgtccagtgcaacagtagcttccttctacttggaaatgagctaagtggggagctaagggaatgagaataactccaggtctgagaacatggagtagttggtgtcagtactctccagaacatggtcagtggcattgtgacaggtcatcgagattggtcatgcctaccacccagagaggattcaaccacactgctccaacacagcctagcatgggcactattgcctcccaaagcgtgaagggagcagccccttgatttccatgtcagggggactgttctgtgggaactgtaagaactggtttgtagacttccattgaagagctcctctgcttcagatcccagagctggagccatcccccttaacatctctctcatgcttctgccttctgcttctttcttccctggccagactgttcgaccaacaatcctgcccaggctaacctgcgccaggagctaaacgactcgctccaggtggctgagaggctgacccagcagtacaacgagctgcttcattccctccagtccaagatgctcaacacctcatccctgctggaacagctgaacgaccagttcacgtgggtgtcccagctggctaacctcacacagggcgatgaccagtaccttcgggtctccacagtgagtagtatcccagttatttgatgagctaaggcccacgtgtgatccagaggtgatggatgcctcttagaggtgccgtgggacaaaggtttacaccatcaggaactgggaaaaccatactcgcgttgtagcattgaaatgccttcacccctcgaggtcagatatccaagtcttatttccaagatgaggaaagagagaggttctgtggcttgctaagtagacggaactttgggcagcttccctgagtcagcctgtcagctgctgctttctgcccagggccatgctgagtgccgcatgaattagtgttagccagtgagatcggcttcctttagtgctcacagcccccctcgtcctctttccaccatagactggctagcatttgtacaaagcaaatgttggggtcaggtgttgtggtgagtgtctgtaagccggcaccaaagaaactgaggcaggaaagtggagatcttgagcccgggctggactatacagtgaaggcctctctcaaacaaggcaaaacaagaagaaaacatttgacaatcatttcaagtttctggggtgcctacttggctagtcagttttcaaataacatctgtcccttcaaatcgagatagttttgctcagaattctctgaacatcttgagtagcaacaggtaacctggagctccatactcggttgcaggggcaaagagaagggcacgctctgtagacattgtgcagagacacttctcctgccttcttctaggtgacaacccattcttctgactcagaagtcccctctcgtgtcactgaggtggtggtgaagctgtttgactctgaccccatcacagtggtgttaccagaagaagtctccaaggataaccctaagtttatggacacagtggcagagaaagcgctacaggaataccgcaggaaaagccggtaagcgggcagcctttctgtgaccctgagggctgataaacaagtctttctaaacaagaccctggaggactggaaagtccgaaggagcccagagaaggagcaaaatatgcattctggatgcagggcctatccctgaggccagaccccacgggtgagctaggaaaacccctggggattttattttctttgctctgggaaatatttttcctcagtggcaaggatgtgggtgttggtggctgcttcttggggggatattgattctcttctctactctccttttttttccagcatggaatgagacagaagcatcagttttctatatgtaggagtctcaaggagggaatctcccagctttccgaggttgctgcagacccctagagaactccacatgtctccagcgcctaggcctccaccccagcagcctctccttcctctgggttctgtactctaatgcctgcacttgatgctctcgggaagaactgcttcccccacgcaactaatccaataaagccaccttgcgtatagtgtgccttgggcccgctttcatattttcatacttgattctcctgcaggccgcacatcttcatttgatatggagagaaaacaaggaagtagctgggtcagttcgtaaagcacttgccacatagacatgagtttggtaaagtcaggcatggtggcaccctcttgtaacttaatctcggcacctcagcgctctcagagcagagggtccctggagctggtgggtggtcggtgagcgtcaggccccagtgagagatcttgtctcagaacacaggtatgaggagaccaaagaatgacacaaggccacacatgtagaagaaatctcgaagttaacagctgagactgtgtaagagtctccatatactggagagtaaagagtactcatgacaactggggggacctctggctttgggggagaggtttgttccaataagctgctgaggcaagttcctgaagccagaaacttttccctcccaccacaacactgtccacgagttctgacaaagtggggcagtctcccagagaatgcactgaaattaaggcaggaagagctgctagtgggacacatgggttaatgtgtaactgacaatttcctgtggaaactgctcagcagaagccaaatgaagaggcagttttcttgttgtttgtaagaacatgggaacctgggaccacttccggaccatggcgtctccc

SEQ ID NO: 1288 - DNA, 2060 bp, Rattus norvegicus
ctgtaccttgtcaccagcgcgtctgaaccctctctgaaccttcctgaagctggaagatttcaccctgatggctgactcaaaaccactcagaaccctggatggggaccctgtggctgtggaggctttgctccgggacgtgtttgggattgtcgtagatgaggccattcggaaggggaccaatgcctctgagaaggtctgcgaatggaaggagcctgaagagctcaagcagctgctggacttggagctgcagagccagggcgagtctagggagcggatcctggagcgctgccgggctgtgattcattacagtgtcaagactggtcacccccggttcttcaaccagctcttctcaggattagatccccatgctctggccgggcgcatcattacggagagcctcaataccagccagtacacatatgagattgcccccgtgtttgtgctcatggaagaggaggtgctgaagaaactccgtgcccttgtgggctggaacactggggatggggtcttctgtcctggtggttccatctctaacatgtacgccataaacctggcccgctttcagcgctacccagactgcaagcagaggggcctccgggtcctgccacccttggccctcttcacttcaaaggagtgccactactccatcaccaagggagctgcttttctgggacttggcaccgacagtgtccgagtggtcaaggctgatgagagagggaagatgatccctgaggatctggagaggcagatcagtctggcagaggctgagggctcggtgccatttctggtcagtgccacctctggtaccaccgtgctaggggcctttgaccccctggatgcaattgccgatgtttgccagcgtcacgggctgtggttacacgtggatgccgcctggggtgggagcgtcctgctgtcccggacacacaggcatctcctggatgggatccagagggctgactccgtggcctggaaccctcacaagcttctcgccgcggggctgcagtgctctgctcttcttctccgggacacctcgaacctgctcaagcgctgccacgggtcccaggccagctacctcttccagcaagacaagttctacaacgtggctctggacaccggagacaaggtggtgcagtgtggccgccgcgtggactgtctgaagctgtggctcatgtggaaggcgcagggtgggcaagggctggagtggcgcatcgaccaggcctttgctctcactcggtacttggtggaggagataaaaaagcgggaaggatttgagttggtcatggagcccgagttcgtcaacgtgtgcttctggtttgtgcctcccagcctgcgggggaagaaggagagcccagattacagccagaggctgtctcaggtggcccctgtgctcaaggagcgcatggtgaagaagggaaccatgatgatcggctaccagcccatgggacccgggccaacttcttccgaatggtggtggccaaccccatactggtccaggccgatatagacttccttctgggcgagctggagcgtctgggccaggacctgtgagctgcttcctctctctgccccacccaagctctgcataagctcctgggttcccaaaagcgacctttctaggaaacagtggccttgactgtgtgagcccccacacactaactctcctagctaagtattggctgccaggacggtgtctaagcacactacagtctgttcttacgaaatgtgcttcttttaagtcggtcatagtggtacacaccgttaataccagcactggggaggcagaggcagacacaagcagatctcttgagtttgaggccagcctggtctacagagctggcctacacagaaaaaaaaacctgtctcaaaaaaaaagaaaggaaggaagaaagaaaggaaaagaaagaaatatttttcattaagattatgtctataaaaaattgttattaatatgagagatatggtacgatgtattaagaaagctagatatgggggttggggatttagctcagtggtagagcccttgcctaggaagcgcaaggccctgggttcagtccccagct

SEQ ID NO: 1289 - DNA, 1225 bp, Rattus norvegicus
gtctggctcccgctctcacagccattgcagtacattgagctccatagagacagcgccggggcaagcgagagccggacgggcactgggcgactctgtgcctcgcggaggaaaatcaactaaacatgggcaaaggagatcctaagaagccgagaggcaaaatgtcctcatatgcattctttgtgcaaacctgccgggaggagcacaagaagaagcacccggatgcttctgtcaacttctcagagttctccaagaagtgctcagagaggtggaagaccatgtctgctaaagaaaaggggaaatttgaagatatggcaaaggctgacaaggctcgttatgaaagagaaatgaaaacctacatcccccccaaaggggagaccaaaaagaagttcaaggaccccaatgcccccaagaggcctccttcggccttcttcttgttctgttctgagtaccgcccaaaaatcaaaggcgagcatcctggcttatccattggtgatgttgcgaagaaactaggagagatgtggaacaacactgctgcggatgacaagcagccctatgaaaagaaggccgccaagctgaaggagaagtatgagaaggatattgctgcctacagagctaaaggaaaacctgatgcagcgaaaaagggggtggtcaaggctgagaagagcaagaaaaagaaggaagaggaagacgacgaggaggatgaagaggatgaggaagaggaggaagaagaggaagacgaagatgaagaagaagatgatgatgatgaataagttggttctacgcatgtttttttttcttgtctataaagcatttaacccccctgtacacaactcactccttttaaagaaaaaaattgaaatgtaaggctgtgtaagatttgtttttaaactgtacagtgtctttttttgtatagttaacacactaccgaatgtgtctttagctagccctgtcctggtggtattttcaatagccactaaccttgcctggtacagtctgggggttgtaaattggcatggaaattaaagcaggttcttgttggtgcacagcacaaattagttatatatggggacagtagttttggttttttggttttctttttttttttgtgtttttgttttttttcctttttgtttttttttccatcttcagttgtctctgatgcagattatacgaaggtaattgttgttctgttaactgaataccactctgtaattgcaaaaaaatg

SEQ ID NO: 1290 - DNA, 1200 bp, Rattus norvegicus
catgagcgccgctcttttcagcctagacagcccagcacgcggcgcaccctggcccacagagcccgcggccttctacgagccaggcagggtgggcaagccaggacgagggccggagcctggggatctgggggagccgggctccacgacccctgccatgtatgacgacgagagcgccatcgacttcagcgcctacattgattccatggctgccgtgcccaccctagagttgtgccacgacgagatcttcgccgacctcttcaacagcaatcacaaagcggccggcgcgggcagcctggagctgctgcagggcggccctacgcgacccccgggtgtggggtcaatcgccaggggcccgctgaagcgcgaacccgactggggcgacggcgacgcgccgggctccctgctgccggcgcaagtggcagtgtgcgcgcagacagtggtgagcttggcggccgcggcacagcccacaccacccacttcgcccgagcctcctcgaggcagccctggaccgagccttgcgcctggccccgtccgagagaagggcgccggcaagaggggtccggaccggggcagccctgagtaccggcagcgacgcgagcgcaacaacatcgctgtgcgcaagagccgggacaaggccaagcgccgcaaccaggagatgcagcagaagctggtggagctgtcggccgagaacgagaagctgcatcagcgtgtggagcagctcacccgggacctggccagcctccggcagttcttcaaagagctgcccagcccgcctttcctgccgcccaccggcaccgactgccggtaacgcgcggtgtgggccttagagactccgaacgaccgatacctcagaccccgacggcggggagcagacgccgcccgaattgctacagtttcttgggcactggactgcgagagaagctatatgaatcccccttaaattatttttttataatggtagcgttttctacgtcttattaccattgcagctaaggtacattgtagaaaagacttttccgacagacttttgtagataagaggaagagactgcgcatgctttttatattcatttttacagtatttgtaagaataaagaagcatttaaattgcaaaaaaaaagaggcaccagctctgactggcctctttctaggctacggtgatcctgagcatcttttgttacctgctggtagaaatgatcct

SEQ ID NO: 1291 - DNA, 970 bp, Rattus norvegicus
gcgccatgacctgggacggactgcccacacagccgctgttgatgctgttaatgctgttgttcgctgcgggctccgagtccgccttagcggggtgcccgggctgcgggccgggggtgcaggaggaagacgcggggtcgcctgcagacggctgtgcagagaccggaggctgtttcaggagagaggggcaaccgtgcggggtctacatccctaagtgcgccccaggactgcagtgccaaccccgagagaacgaagagacacctttgcgggcgctgctgatcggccagggccgctgtcaacgcgccagagggccgtcggaagagactaccaaggagagcaaaccccatggaggcgcctcccgcccacgtgacagagaccggcaaaagaatccacggacctcggctgcccctataaggcccagtcctgttcaagatggtgaaatgggcccctgccgcagacacttggattcagtactgcagcagctccagactgaggtcttcagaggcggagcaaatgggctctatgtgccaaactgtgacctcagaggtttctaccgcaagcagcagtgtcgttcctcgcaggggaatcgccgtggtccctgctggtgtgtggatccgatgggccagcctttgccagtgtctccagatggccagggaagctctcagtgctctgccaggagcagcgggtgaaacctggtgggagcctccaggaccctggcaggagcatggggctgtcatttgagctctatgtgaagtgatgataactctgtgccccgagatgagacccaccttcaagccctaccccattgtccctgtcacccctgggcctttacacagcaagttagaaagattgttgttggcttgtgtactaataaagctggacacaagggtttgtctttcaatagatcgcagcgagggagctgctctgctacgtacgaaaccccgacccagaagcaggtcgcccgtcacgccgc

SEQ ID NO: 1292 - DNA, 2063 bp, Rattus norvegicus
agcggacgctgtctgaggagtagagcctgcctgagagcgagtgtcccgtcggtcccggagcagcccagcccggcccagccctcacaggtcctctgtggtgcacacagcccacctcccagccatgcgctctctccttctgggcaccttatgcctcctggctgtggccctggcagccgaggtgaagaaacctgtagaggccgcagcccctggtactgcggagaagctgagttccaaggcgaccacactggcagagcgcagcacaggcctggccttcagcctgtatcaggcaatggccaaagatcaggcggtggagaatatcctcctgtcacccttggtggtggcctcatccctgggccttgtgtcactgggtggtaaagccaccacagcttcgcaggcgaaggcagtgttgagcgctgagaagctgcgggatgaggaggtgcacacggggctgggcgagctcgtgcgctccctcagtaactccactgcgcgcaatgtgacctggaaactgggcagccgcctgtacgggcccagctccgtgagcttcgccgatgacttcgtgcgcagcagtaagcaacactacaactgtgaacactccaagatcaacttccgagacaagcgcagcgcgctgcagtccatcaacgagtgggcctcgcagaccaccgacggcaagctgccagaggtcaccaaggatgtggagcgcacggatggggcactgctcgttaatgccatgttctttaagccgcactgggatgagaagttccaccataagatggtagacaaccgtggcttcatggtgacccgctcctacactgtgggtgttacgatgatgcaccggacaggcctctacaactactatgacgacgagaaggagaagctgcagctggtggagatgcccttggcccataagctctccagcctcatcatcctcatgccccaccacgtagaaccgctcgagcgcctggagaagttgctgaccaaggagcaactaaagacctggatggggaagatgcagaagaaggctgttgccatctccctgcccaagggagtggtggaggtgacccatgacctgcagaaacatctggccggactgggcctgactgaggccatcgacaagaacaaggcagacttatcgcgcatgtctggcaagaaggatctgtacctggccagtgtgttccacgccactgccttcgagtgggacacagagggcaacccctttgaccaggacatctacgggcgtgaggagctgcgcagccccaagctgttctatgccgaccaccccttcatcttcctggtgcgagataatcagagcggctccttgctgttcattggccgcctggtccggcccaagggagacaagatgcgagacgagttgtagagtccaagagtggtcgtggcgtggcatggcgggaagtagccagaggttcctgagacacatgggtgctattgtggggggagggggaggcaccaaccctggatagtccacgggtgggggggggttggcagtgcagatcggaattcccataggtctgagtaggtatttttagacaagagtccactccgttagacatggagcccagacactatgagaccaaattcaggggtgtcacagccattctagccctgccccacaagttttatatccaatctagcctcaacagtcaatcagtgttcatattcgtggccaagcattctgtctgtgagacaatcgagttgggtgggggtagggcggcctagcctctctgtcaccatgccctgagccctcggttttcctgttcacctctgattccctttaaccacaaaactaggagcctgtggtcccagaactgcccacccttaaaatcgattctttgccgcagcagtgggagttggggagaccatgcataggagggctccttggcatatccggccctagagccattacattacattgacaactcaactttgcttctgttttctccctttttgagtttttcaaggaatgggggtttggggaaggggaagcctttattgctttcaaaacaagaacagtttgtcaattttttttgaataaaccttttccaatg

SEQ ID NO: 1293 - DNA, 2977 bp, Rattus norvegicus
gaattcggcggatggaagccagctgtcccgagaagcagtgaactgtggcgtcatcccgagcagtgccttaccggtattgtgctgcttcacctgcctcgctcggcgttctcctcaggccccgccatggagcgacaggtccaacgacttcgccagacgttccggtccggccgatcgcggccgctgcgtttccgactgcagcagctcgaggccctccggaggatggtgcaagagcgagagaaggacatcttggcagccatcgcagcagacctgagcaaaagtgaactcaatgcatacagtcatgaagtcattaccatccttggggagattgacttcatgctggggaatcttcctgaattggcctctgctcggccagcgaagaagaacctgcttaccatgatggacgaggcctatgttcagccagagcctctgggagtcgtgctgattattggagcttggaactatccttttgttctgaccctgcagccactggtgggagccattgctgcaggaaatgctgccattgttaagccctcggaactcagtgaaaacacggctaagatcttggctgaactcctccctcagtatttagaccaggacctgtacatgattgttaatggcggcgttgaagaaaccacagagcttctgaggcagcggtttgatcacattctctacacaggaaacaccgcagttggaaaaattgtcatggaggctgctgccaagcacctgacccctgtgaccctggagctcgggggcaaaagcccatgctacattgacagagactgtgacctggacgttgcttgcagacggataacctggggaaagtacatgaattgtggtcagacctgtattgctcctgactatatcctgtgtgaagcctcctcccaggatcaaatcgtacagaagattaaggatacggtgaaggacttttatggggaaaatgtaaaagcttctcctgattatgaaaggatcatcaaccttcgtcactttaagaggataaaaagtttgcttgaaggacagaaaatagcttttggtggggagactgatgaagctacacgctacatagccccaaccatactcactgatgttgaccctaactccaaggtgatgcaagaagaaatttttggaccaattctcccaatagtgtctgtgaaaaatgtggaggaagccataaatttcataaatgatcgcgaaaagcccctggcactctacatattttctcacaacaataagctcatcaaacgggtgattgatgagacatccagtggtggagtcacaggcaatgatgtcatcatgcacttcactgttaattctttgccctttggaggtgtgggtgccagtggaatgggggcttatcatggcaaatacagtttcgataccttttctcatcagcgcccctgcttgttaaaagggttaaagggagagagtgttaacaaactcaggtaccctcccaacagcgagtccaaggtcagctggtcgaaattcttcctgctgaaacagttcaacaaaggaaggctgcagctgctgcttctcgtgtgcttggttgcggttgcagctgtgatcgtcaaggatcagctgtgatgacttccttgtagcctctactgaagtacccctcggccaaatggttaacacaccaatgcttttaaaattgtacccaaaccaggaaatgaaattcacaggtgaactgcagtcaaacctaagttgttgccacaaaccactgatgaaactcagtgcttcagccaaatcccagcatttgtcagccgtgcaggtgctgagagggtggagactgggaggggcgacacctagtccatggcagcgggatgtcagggagactcgacaactgctcccgcactctttgctccaggacatagctctcccacccggtgtcaacaccctccaggctttccagctgtcctctgattgctgaggttcctgttagggacccaggtactaaacctgggcgggtggatttgtcggcctcatccattgtggctcgagaccggccttcgggagtcggctctcagtctaaacatcctttctcattcatagtgtgtcacccgaagatgcttgtttgtgacattgtgacagtctgtcatgactgtcccggtgcctttgtgatgacttaaactacactgaggagcttgccaacttgtgaatgcccttcagagggtctggcagtcacagctgttccagagcccgagggacgaagattccggagcccggagtttgaggccaacctaggcaacataatgggaccctctcattattattcctccataacaatcccctcgagaccctcgatttgaatgttatataggtcttcaggataaatctgcttattttcacagcacaacacaaaaaaaatttacttttgaaatcttagagagattcctacagatcttagcatggagctgttcctgtagtgaaaggggggttattagacatgaggcttcagaactcatggggcagggttgttggagactaccgtgagctgagggggcacactgaagcgatgggatggccagaagcgcacctgagcaagcggggcagcattctctgtcagaccctaacatggctacacggggatgtggcagagagatctgtgccgttggctgccagcgctggttaggcctgaagctccaagctgcagaggtctcattgccttcccaggatccaaattaagactgcccactcaatgagaatgtcacttgcgtatgtacaaccatgtttgctgagtaacctgttccaccgttgaggctgtctgaagtgtattgtatgaggtatcaagaacgagtcattggcccatttggcaaatagttgcttatgtagcaattgtcatggactaatcataaaatattttgcacaaaatttcaatgttgaacttgcactcactgttgttaaattataaatcacagcttctagttaggccaaaatatttacatactctactaatcttcaaaataaatgtatcccggaattc

SEQ ID NO: 1294 - DNA, 1450 bp, Rattus norvegicus
cggggactggatgatgctgtcccgctggagaggattcgtggcttgagtcctgttccacccgatcaccggggtggccgaggcggtaccagcgctgcgctctctcagctcctgccacattccctgagttaacatatgagagattggtatagaaatggctggcattttgtctggataaatcacacaaccctcccagaaagtgatcaccaggtcaagtggatttcgaatagtgtctgagaccaactcaacccagaaaaacaaaatggcccttaactcttctgctgaagatggtatcaaaagaatccaagatgactgccccaaggctggcaggcacagttacatatttgtcatgatccctaccctctacagcatcatctttgtggtgggaatatttggaaacagcttggtggtgattgtcatttacttttacatgaagctgaagactgtggccagcgtctttcttctcaatctcgccttggctgacttatgctttttgctgacttgtcccctgtgggcagtctataccgctatggagtaccgctggcccttcggcaatcacctatgtaagatcgcttcggccagcgtgacgttcaacctctacgccagtgtgttccttctcacgtgtctcagcatcgaccgctacctggccatcgtccacccaatgaagtctcgccttcgccgcacgatgctggtggccaaagtcacctgcatcatcatctggctgatggctggcttggccagtttgccagctgtcatccaccgaaatgtatacttcatcgagaacaccaatatcacagtgtgcgcgtttcattatgagtctcggaattcgacgctccccatagggctgggccttaccaagaatattctgggcttcttgttccctttccttatcattctcaccagctatacccttatttggaaagctctaaagaaggcttatgaaattcaaaagaacaaaccaagaaacgatgacatctttaggataattatggcgattgtgcttttcttcttcttttcctgggtcccccaccaaatattcactttcctggatgtgctgattcagctgggcgtcatccatgactgtaaaatttctgacatcgtggacactgccatgcccatcaccatctgcatagcgtattttaacaactgcctgaaccctctgttctacggctttctggggaagaaatttaaaaagtatttcctccagctcctgaaatatattcccccaaaggccaagtcccactcaagcctgtctacgaaaatgagcacgctttcttaccggccttcggataacatgagctcatcggccaaaaagcctgcgtcttgttttgaggtggagtgacaggttcaaagcacactggcaatgtaatgccctgacagaagccagggagcctctgactaaatggcttacgaccaaaggaccattcaccctgcctcaggatctaagcagaaa

SEQ ID NO: 1295 - DNA, 1192 bp, Rattus norvegicus
ggaaaggagccgttagcgtgctccgtccattgccatccaccggtcgttcccggcgacagacctccgtcaacttttgaaggggagttggttctcaggtccagcggccgcgatccctggtctcccagcctacggagttacccggcggagttcaagtccagcagccatgtccatgagcctggagatcaccggcacgtcgctggccgtgctgggctggctgtgcaccatcgtgtgctgcgcccttcccatgtggcgcgtttcggcattcatcggcagcagcatcatcacggcgcagatcacctgggaaggcctgtggatgaactgcgtgcagagcaccggccagatgcagtgcaagatgtacgactcgctgctggccctgccgcaggacctccaggccgcccgagctctcatcgtggtgtctatcctactggcagccttcgggctcctcgtggcgctcgtgggggcccagtgtaccaactgcgtacaagatgagacggccaaggccaagatcaccatcgtggcgggagtgcttttcctgttggcggctgtgctcaccttagtgccggtgtcctggtccgccaacaccatcatccgggatttttataacccgctggtacctgaggcccagaagcgagagatgggaactgggttgtacgtgggctgggctgccgccgcgctgcaattgctagggggcgccttgctgtgttgctcctgcccaccacgcgagaagtacgcacccaccaagatcctctattccgcgccgcgatccaccggccctggcaccggtaccggcaccgcctatgaccgtaagactacgtctgagaggccgggtgcgcgcacaccgcaccatcaccactaccaaccgtcgatgtaccccacccgtccagcgtgcagcctcgcctcagagaccaccccaccttccagacggttacagacgccacgcagtctgcttgctaggctggaagaggacagacagcctggcgtccccttttctccggttgccacctgattacctggcctaggaactgtccaagtcgaatggacaaagacacctcgcccttcccaagtacagggttggggtggccatcgcagctacttgccagccccgcagccagaaggctcatagtgggcagagacaggcaaactataaaaagggccgtttcgtatttttcaataaaagcctttcgtttttgca

SEQ ID NO: 1296 - DNA, 1532 bp, Rattus norvegicus
gaagccagttatcacttgggtgctgtataacatcagtccaggatctctggccttcatagtttctgcggagaagtctggtgtgattctgctaaaggacacttctctgtgaagggagcctctgatacattgcctatagcaagaagaaggggccaacctgaagaaaaacatgccatctgcacttgctttcgtcctacttgttctcaacatcagcctcctgaagggacagtcaccaccagggaaacctgagatccacaaatgtcgctctcctgacaaggaaacattcacctgctggtggaatcctgggacagatggaggacttcctaccaattattcactgacttacagcaaagaaggagagaaaaccacctacgaatgtccagactacaaaaccagtggccccaactcctgcttctttagcaagcagtacacttccatctggaaaatatatatcatcacagtaaatgccacgaaccaaatgggaagcagttcctcggatccactttatgtggatgtgacttacatcgttgagccagagcctcctcggaacctgacattagaagtaaaacagctaaaagacaaaaaaacatatctgtgggtaaaatggtccccacccaccataactgatgtgaaaactggttggtttacaatggaatatgaaattcgattaaagcctgaagaagcagaagagtgggagatccattttacaggtcatcaaacacagtttaaagtttttgacctatatccagggcaaaagtatcttgtccagactcgctgcaagccagaccatggatactggagtagatggagccaggagagttccgttgaaatgccaaatgacttcaccttgaaggacacaaccgtgtggatcattgtggccattctctctgctgtcatctgtttgattatggtctgggcagtggctttgaagggctatagcatgatgacctgcatctttccaccagttcctgggccaaaaataaaaggatttgatacccatctgctggagaagggcaagtctgaagagctgctgagtgccttggggtgccaagactttccccctacttctgactgtgaggacttgctggtggagttcttagaagttgatgacaatgaggacgagcggctaatgccatcccattccaaagagtatccaggtcaaggtgttaagcccacacacctagatcccgacattacggataacaatatcctcgtattagtgccagactcacgagcccagaacacagcgttgctcgaggaatcagccaagaaggctccaccatcgtttgaagctgaccaatctgagaaagatctggccagcttcactgcaacctcaagcaaccgcagactccaactgggtaggctggattacctggatcctacgtgcttcatgcactcctttcactgatagctagacttatggaacgattggctaaactgtgatttctcttcaggtaacactacagagtcatgaagtaatgtggtctgctagcaaatgttacaggatgtgggtataaaaaaaaaaaaaaaaaaaa

SEQ ID NO: 1297 - DNA, 895 bp, Rattus norvegicus
atgggcacccgcgacgacgagtacgactacctctttaaagttgtccttattggagattctggtgttgggaagagtaacctcctgtctcgatttactcggaatgagtttaatctggaaagcaagagtaccattggagtagaatttgcaacaagaagcatccaggttgatgggaaaacaataaaggcacagatatgggacacagcagggcaggagcggtacagggctataacgtctgcatactatcgtggagcagtaggtgccttattggtttatgacattgctaagcatctcacatatgaaaatgtagaacgatggctgaaagaactgagagatcatgctgatagtaacattgttatcatgcttgtgggcaataagagtgatttacgtcatctcagggcagttcctacagatgaagcaagagcatttgcagagaagaatggtttgtcgttcattgagacatctgctctagattctacaaatgttgaagctgcttttcagacaattctaacagagatataccgcattgtttctcagaagcaaatgtcagacagacgtgaaaatgacatgtctccaagcaacaatgtggttcctattcatgtcccacccaccactgagaacaagccaaaggtgcagtgctgtcagaacatctaaggcgcctctctcccctagacggctgtgtatagtccatttcccaggtctgagatttaaatatatttgtaattcttgtggtcactttctgtgttttattacttccttacacttaagaatcttcccatgtcttaagtctttgatttggctttataaaatcctcaactttgtcctgaatgactcgagttctttttcatgctatggcttctctagccttagtttaataaactgaatgtttgaagtcctc

SEQ ID NO: 1298 - DNA, 1386 bp, Rattus norvegicus
ctgctgcccagtgctcttcagcatgtcctttattccggtggccgaggactccgactttcccatccaaaacctgccctatggcgttttctccactcaaagcaacccaaagccacggattggtgtggccatcggtgaccagatcttggacctgagtgtcattaaacacctctttaccggacctgtcctctccaaacatcagcatgtcttcgatgagacaactctcaatagctttatgggcctcggccaagcggcatggaaggaggcaagagcatctttacagaacttactgtctgccagccaagcccagctcagagatgacaaggagcttcggcagcgtgcattcacctcccaggcttctgccacgatgcaccttcctgctaccataggagactacacggacttctactcctctctgcagcatgccactaacgttggcattatgttcaggggcaaggagaatgcgctgttgcccaattggctccacttacctgtgggataccatggccgagcttcctccgttgtggtgtctggtaccccaattcgaagacccatgggacagatgagacctgataactcaaagcctcctgtgtacggtgccagcaaacgcttagacatggagttggaaatggctttctttgtaggccctgggaacagattcggcgagccaatccccatttccaaggcccaggagcacattttcgggatggtcctcatgaacgactggagtgctcgagacatccagcaatgggagtacgtcccccttgggccattcctggggaaaagttttggaaccaccatctccccatgggtggtgcccatggatgctctcatgccctttgtggtgccaaacccaaagcaggaccctaagcccctgccatatctctgccacagccagccctacacatttgatatcaacctgtccgttgctttgaaaggagaaggaatgagccaggcagctaccatctgcaggtccaactttaagcacatgtactggaccattctgcagcaactgacacaccactctgttaatggatgcaatctgagacctggggacctcttggcttctggaaccatcagtggatcagaccctgaaagctttggctccatgctggaactgtcctggaagggaacaaaggctatcgatgtggggcaggggcaaaccaggacctttcttctggacggagatgaagtcatcataacaggtcactgccagggggatggctaccgtgttggttttggccaatgtgctgggaaagtgctgcctgccctctcgccagcctgaagctccagaatccacagaacacagccttgccttgtgaggatcatactgcaactgcatgagtcaggaatgaataaagctattttgattggggaaaaaaaaaaaaa

SEQ ID NO: 1299 - DNA, 1176 bp, Rattus norvegicus
cggtcccggaagccggaacccgtagcttgtgggtctttggtctgaagaccatgaacgcggcggttggccttcggcgccgcgcgcgattgtcgcgcctcgtgtccttcagcgcgagccaccggctgcacagcccatctctgagtgctgaggagaacttgaaagtgtttgggaaatgcaacaatccgaatggccatgggcacaactataaagttgtggtgacaattcatggagagatcgatccggttacaggaatggttatgaatttgactgacctcaaagaatacatggaggaggccattatgaagccccttgatcacaagaacctggatctggatgtgccatactttgcagatgttgtaagcacgacagaaaatgtagctgtctatatctgggagaacctgcagagacttcttccagtgggagctctctataaagtaaaagtgtatgaaactgacaacaacattgtggtctacaaaggagaatagatcttaggtttaatattgtagaaaagctaatttcttttcttactagaaaaagctctttgtccttttaaagtacacagcagtcatcacctacccgtgtctccatgttgtgttctggtgtgcctgagcgttaaagggattgtgaggtctgtatgtaaatgcattaagaagcaaattcgaagtgcatcctgagtgtattcttggtgagaaagcaggggagaactgaggattgaagcccgggcctcacacatgtgaaacatatactctgctccgacatgcatcccagtccgccaaggccgtttagaggatctttacctagagatagagattgttttatcttcagctggagagacagctcagtggttaggagcactgactgcttctccagaggtcctgagttcaaatccaccagacggtggtggctcacaaccatctgtaatgggatccgatgctctcttctggtgtgtaggtgtacatacagacaaagcattcctacatttaagaaaatacataaataagtttcaaaaattatttcatctggggctggggatttagctcagtggtagagcgcttacctaggaagcgcaaggccctgggttcggtccccagctccgaaaaaaagaaccaaaaaaaaaaaaattatttcatctgagcaaaatgttttgatgtggaattatgtaaaggtaaaataaac

SEQ ID NO: 1300 - DNA, 2280 bp, Rattus norvegicus
cagcaagccaccttttcactctgtccctactggaaagcactgggaagagctgcaccggatagacatgaatgaggacaaagacaagagagactctatccagatgagtatgaagggatgccggacgaataacgggtttgtccaaaatgaagacatccaggagcaggacccagactccagggacactccacagtccaacgctgttagtatccctgctccagaggagcctcaactaaaggtggtgcggccctatgcagggatgcccaaggaggtgctgttccagttctctggccaggctcgctaccgggtgcctcgggagatcctcttctggctcaccgtggtctccgtgttcctgctcatcggagccaccatagccatcatcatcatctctccaaaatgccttgactggtggcaggcaggtcccatgtaccagatctacccgaggtcttttaaggacagtgacaaggatgggaatggagacctgaaaggtatccaagagaagctggactacatcactgctttaaatataaagaccatttggatcacttccttttataaatcacctttgaaagattttagatatgctgttgaagatttcaaagaaattgaccctattttcggaacaatgaaagattttgagaatttggttgctgcggtccatgacaaaggtttaaaattaataattgacttcataccaaaccacaccagtgacaaacatccttggttccaatcgagtaggacacggagcgggaaatacactgattattacatctggcacaactgtacccacgccaacggtgtaaccacccctcccaacaactggctgagcgtgtatggaaactccagctggcagtttgatgaagaacgaaagcaatgttattttcaccagtttttgaaagagcagccggatcttaatttccgaaatcctgctgttcaagaagaaataaaggaaataataaagttctggctctcaaagggtgttgatgggtttagtttcgatgcagttaaatttcttctggaagcaaaggacctgagaaatgaaatccaagtaaatacatcccaaattccggacacagtgacccgctactcagaactgtaccacgacttcaccactacccaggtgggaatgcatgaccttgtccgggacttccggcagaccatgaaccagttcagccgggagcctggcagataccggttcatggggacggaggtgtcagctgagagcaccgagaggaccatggtgtactatggcctgtcatttatccaggaagctgacttccctttcaacaagtacttagccacactagacactctttccgggcatactgtgtacgaagctatcacatcctggatggaaaacatgccggaaggaaaatggcccaactggatgattggcggaccagagacttctcggctgacttctcgagtagggagcgagtatgtcaatgccatgaacatgcttctgttcacactcccaggaacccccataacttactatggggaagaaatagggatgggagatatttccattacaaacctcaacgagcgctatgacactaacgcccttctctccaagtcaccgatgcagtgggacaatagttcaaatgcggggtttactgaggccaaccacacctggctccccacaaactctgactaccacacagtgaatgtggatgtccaaaaaacccagccgagctcagcactgaggctatatcaggatctgagtctactccatgccagagagctgcttctcagcagaggctggttttgccttttgagggacgacaatcactctgttgtgtacaccagggagctggatggcatagataaagtcttccttgtggttctgaattttggagaatcatcaactgtgctaaatctacaggaaactatttcagatgttcctacaaaactgagaataagattaagtaccaatccagcctccaaaggcagtgatgttgatacccatgccgtttctctggagaagggagaggggctcatcttggaacacagcatgaagactctcctccatcaccagaaagctttcagagacaaatgttttatttccaaccgtgcatgctactccagcgtgctggaccttctgtatagctcgtgctaggcagctctgtaagaggtggccaccctgcgtctggtatgcttgccatcacacatgcaagggcctcaggaatggcatcagttcttagatatttctgtagcacgaatgcattgttttaggtaagattctcaaatgtttggaaggacaataaaatgtttaaaagatta

SEQ ID NO: 1301 - DNA, 431 bp, Rattus norvegicus
gaagtttgcgtgctgccatggagaccagagccttctggacaaccctgctgctggtcctggttgctgggtcctcctgcaaagcccaggaatttgttggcctatctccaagccaatgtatggctccaacaaatgtcagggtggactgtaactaccccactgtcacatcagagcagtgtaacaaccgtggttgctgttttgactccagcatcccaaatgtgccctggtgcttcaaacctctgcaagagacagaatgtacattttgaagctgtccaggctccaggaagggagctccacaccctggactcttgctgatggtagtggcccagggtaacactcacccctgatctgctccctcgcgccggccaatataggagctgggagtccagaagaataaagaccttacagtcagcacaaggctgttctaattgcgg

SEQ ID NO: 1302 - DNA, 2153 bp, Rattus norvegicus
cgtcccctccgttctgcatccccaaacttcagccgcagctctgtttcaacccatcggctgcttgcttcaaatcagacagcaccgcgacccagacacccgagtccgcggagtgaaagcacaacgccgagtaggaccagaccaggaaaatagactcgtgaagcagcaactctggattgggagggcagaagccaacaagtgagaaggcgcggcgtttccggggcgctgtgcgaaagctagagcaggcgccagagaagacagctcgagctcagaacccgagaccaagcctctctcccggaggcagctcagctcctatcttctctaggcccgctgcagcgtgcgctgggcttcgttttatgcgggtacgagccacgtccccggggaatatgcagcgtgcgtggatcctgctcaccttgggcttgatggcctgtgtgtcggcagagacgagagcagagctgacatctgataaggacatgtaccttgacagcagctccattgaggaagcttcaggattatatcctattgatgatgatgactattcttctgcctctggctcaggagcttatgaagacaaagggagtccagatctgacaacatcccaactgattccaaggatctccctcactagtgctgctcccgaagtggaaaccatgacgttgaagacacaaagcatcacacccactcagaccgagtcacccgaagaaactgacaagaaggagtttgaaatctctgaggcagaagaaaagcaggaccctgctgtaaaaagcacagacgtgtacaccgagaaacattcagacaatctgttcaagcggacggaagttctagcagctgtcattgctggcggtgtgattggctttctctttgccattttcctcatcctgttgttggtgtaccgcatgcggaagaaagacgaaggaagctacgaccttggagaacgcaaaccgtccagcgcagcttaccagaaggcacccactaaggagttttatgcataaaactcccacttagtgtctctatttaagagatcactgaacttttcaaaataaagctttagcatagaataatgaatatctttgttatctgttttgttcattacagagccatgctggccctttaatgatgaagatcccattgtatttaaaatttttcatatatttctttagaatgacttaaaagtaaaaatttaacatctgcagtgttctgtgaatagcagtggcaaaatattttgttacaaaaacccttgacattcatggaattgatttgaacatctatgtgcaaatacaaaatgattgtgtttgtcctctggttcaaagatgactgctgttcccctcatcagcagatctccagttgaccttaccgagttgatctttgttaatttatctcttgttcctcttctctgccctcccttcttgtctcctcccttaaaaacaaaaccttatgccttttgtagctgtcatggtgcaatttgtctttgaatgattacaataatggtaatttagtgtatatgtgatttttttcaattatgtaaactttaacctcctctttatgtaatttttttaaatgtcagactacccattttacacttgctttaatttccattccctgtagcttcaggcagatttgcaaaggcaaattataaaattggattattactacgaaactgttagtcctagttatctaagcagtcttctcttggaggatttgacatcactgacaagcctcagcaaacccaaagatgctaacagtatttgagaagttgctacagactcctttggccactgtacttgctagtttacaatttgaaggtacaaggaagagtttaaaggaaaaaaaagatcagtttttgttcttaaaaatgcatttaagttgtaaacatctttttaagcctttgaagtgcctatgattctatgtaacttgttgcagactggtgttaatgagtatatataacagtttttaaaaagttggtattttataagcacagacaattctaatggtaacttttgtagtcttatgaatagacataaattgtaatttgggaacaagcaaactactgaataaatcacatggcctaatattgaaaatgtcactgttataaatttgtacatttcttatcaaatgtacagcttccctttgctatgactgactgtctgttctcagtg

SEQ ID NO: 1303 - DNA, 4254 bp, Rattus norvegicus
gctcccatcttcgaggctcagctcaactcagagctacttcttccaaattctacatcttggcggacttcgcgaaggaaacccggagtgttacgtgaggtcctgatggagtttgaagagggccttaacggaagagcagacaagaacttctcaaagatgggcaaaaagagtaaaaaggagaaggagaagaaacctgctgttggcatattcgggatgtttcgctatgcagattggcttgacaagctgtgcatggctctgggaactctcgctgctatcatccacggaaccctgcttcccctcctgatgctggtgttcggatacatgacagatagttttaccccaagcagagacccgcattctgaccgagcgattactaatcaaagtgaaatcaacagtacacataccgtcagcgacacgagtctggaggaggacatggccatgtatgcctactattacacgggcattggtgccggtgtgctcatcgttgcctacatccaggtttcactttggtgcctggcagctgggagacaaatacacaagattaggcagaagtttttccatgccatcatgaatcaggagataggctggtttgacgtgaatgacgctggggagctcaacacccgtctcacagatgacgtctccaaaattaatgacggaattggtgacaaacttggaatgttctttcagtccataacgacattttcagccggttttataataggatttataagtggttggaagctaacccttgtaattttggccgtcagccctcttattgggttgtcatctgccatgtgggcaaaggtactgacttcatttactaataaggaactccaggcttatgcgaaagctggagcagttgccgaagaagtcttagcagccatcagaactgtgattgcgtttggaggacaaaagaaggaacttgaaaggtacaataaaaatttagaagaagctaaaagagttggcataaagaaagccatcacggccaacatttccataggtattgcctacctgttggtctatgcgtcttatgcactggcattctggtatgggacctccttggtcctctcaaatgaatattctattggacaagtgcttaccgtcttcttctctattttattggggactttcagtattggacatttagccccaaacatagaagcctttgcaaatgcaagaggggcagcctatgaaatcttcaagataattgataatgagccaagcatcgacagcttctcaaccaagggacacaaaccagacagtataatgggaaatttggaatttaaaaatgtttacttcaactacccatcacgaagtgaagttaagatcttgaagggcctcaacctgaaggtgaagagcgggcagacggtagccctggttggcaacagtggctgtgggaaaagcacaactgtccagctgctgcagaggctctacgaccccatagagggcgaggtcagtattgacggacaggacatcaggaccatcaatgtgaggtatctgcgggaaatcattggggtggtgagtcaggaacccgtgctgtttgccaccacgattgccgaaaacattcgctatggccgagaaaacgtcaccatggatgagatagagaaagctgtcaaggaagccaatgcctatgacttcatcatgaaactgccccacaaatttgacaccctggttggtgagagaggggcgcagctgagtgggggacagaaacagaggatcgccattgcccgggccctggtccgcaaccccaagatccttttgttggatgaggccacgtcagccttggacacagaaagcgaagccgtggttcaggccgctctggataaggctagagaaggccggaccaccattgtgatagctcaccgcttgtctacagtgcgcaatgctgacgtcattgctggttttgatggtggtgtcattgtggagcaaggaaatcatgaagagctcatgaaagagaagggcatttacttcaaacttgtcatgacacagactagaggaaatgaaattgaaccaggaaataatgcttatgaatcccaaagtgacactggtgcctctgagttgacttcagaagaatcaaaatctcctttaataaggagatcaattcgcagaagtatccacagaagacaagaccaggagagaagacttagttcgaaagaggatgtggatgaagatgtgcctatggtttccttttggcagatcctaaagctaaatattagtgaatggccctatttagttgtgggtgtactttgtgctgttataaatgggtgcatacaaccagtgtttgccatagtgttttcaaagattgtaggggttttttcaagagacgacgaccatgaaaccaaacaacggaattgtaacttgttttcccttctctttctggtcatgggaatgatttcttttgttacgtacttctttcaaggcttcacatttggcaaagctggagagatcctcaccaagcgactccgatacatggtcttcaaatccatgctgcgacaggatataagctggtttgatgaccataaaaacaccactggctcgctgactaccaggctcgctagtgacgcttctaatgttaaaggggctatgggctccaggcttgctgtagttacccagaatgtagcaaaccttggcacaggaattatcttatccttagtcttagtctatggctggcagcttacacttttacttgtagtaattataccactcattgtcttgggtggaattattgaaatgaaactgttgtctggtcaagccttgaaggacaagaaagagctagagatctctgggaagatcgctacagaagcaattgaaaacttccgcactgttgtctctttgactcgggagcagaagtttgaaactatgtatgcccagagcttgcagataccatacagaaatgctttgaagaaagcacacgtctttgggatcaccttcgccttcacccaggccatgatttatttttcctatgctgcttgtttccggttcggtgcctacttggtggcacgagaactcatgacgtttgaaaatgttatgttggtattttctgctgttgtctttggtgccatggcagcagggaataccagttcattcgctcctgactacgcgaaggccaaagtctcggcatcccacatcattgggatcattgagaaaatccccgagattgacagctacagcacggagggcttgaagcctaattggttagaaggaaatgtgaaatttaatggagtcaagttcaactatcccacccgacccaacatcccagtgcttcagggactgagcttcgaggtgaagaaggggcagacgctccgcctggtgggcagcagtggctgcgggaagagcacggtggtccagctgctcgagcgcttctacaaccccatggctggaacagtgtttctagatggcaaagaaataaagcaactcaatgtccagtgcgtccgcgcactgggcattgtgtcccaggagcccatcctgtttgactgcagcatcgccgagaacatcgcctacggagacaacagccgtgtcgtgtctcatgaggagatcgtgagggccgccagggaggccaacatccaccagttcatcgactcactgcctgagaaatacaacaccagagtgggagacaaagggactcagctgtcgggcgggcagaagcagcgcatcgccatcgcgcgcgccctcgtcagacagcctcacatcttacttctggatgaagcgacatcagctctggatacggagagtgaaaaggtcgtccaggaagcgctggacaaagccagggaaggccgcacctgcgttgtgatcgcgcaccgcctgtccaccatccagaacgcagacttgatcgtggtgattcagaacggccaggtcaaggagcacggcacccaccagcagctgctggcccagaaaggcatctatttctcgatggttcaggctggagcaaagcgctcatgagctgggagtatttgaggtgctaagtatttctaatattggtgttcaaacatggcacgtaaccaaagttaaaaggttaaaagcactgttaaaggtaatttcatcaagacgagaagccttcagagacttcataattaaatgaaccgaaattgaaaaaaaaatcattaaacagggccacattttttaattgtattatgtgattcaagagaacatatagtttttttaaaaagaaatgtgtagttttgtttcagtttttttaatttctaccctattcccttaaatgatcataaaggctgtaaaaagcactatttttttgcggcc

SEQ ID NO: 1304 - DNA, 1186 bp, Rattus norvegicus
agggcgggttctcaggcaccttcactggcttggatccctcggggtacaggctgttcaccaacttgctcagaatcacgccattcttcagccacacctggaagcccagacagcaacgctactctccttccagcccacaaacgaccaagccttttctgcctcaacatggccaacaagggtccatcctatggcatgagccgtgaagtgcagtccaagattgagaagaagtatgatgaggagctggaggagcggctagtggagtggattgtaatgcagtgtggccctgatgtgggccgtccagatcgtgggcgcctgggcttccaggtgtggctgaagaatggcgtgattctgagcaagttggtgaacagcctgtaccccgagggatccaagccagtgaaggtgcctgagaacccgccctccatggtcttcaagcagatggaacaggtggctcaattcttgaaggcagctgaggattatggagtcacgaagactgacatgttccagactgttgacctctttgaaggaaaagatatggcagcagtgcagaggactgtaatggctttgggcagtttggccgtgaccaagaacgatggacactaccgtggagatcccaactggtttatgaagaaagcccaggagcataagagggagttcacagacagtcaactgcaggaggggaagcacgtcattggccttcaaatgggcagcaacagaggggcctcacaggctggcatgacaggctatgggcgaccccggcagatcatcagttagaaagggaaggccagctctgagctgcagcatcctgcttagcctgcctcacccacgcctatataggttcttagcccggacagctttgaggtatcactgggcaaagatgactgcacatgggcagctcccacctatcctcagcctcagccccgcttcttaccccagagccaccactgtcctggcccctgttcccagctgtccccccacctctaccgtttcccccatcctggagtaagcagggagaagtgggctgaggtagcctgactgtaggccagcccactgtccttggaagccaatgtcctttgaaagagaccctgcctctacatctttttctggaatattttttgggttgaaattcaaaaaggaaaaaaatatatacatatacatatatctccaaaaaaaataaaaaaaaaaaaaaaaa

SEQ ID NO: 1305 - DNA, 3224 bp, Rattus norvegicus
ctcaaggggcctctgggttctatttccaaagttctcggtgtgttccgtaatacttacgttacatctctcgggtgtggagctaggaatctccagtaagagagaacatgcgatatttgttgttctggtatggattgcctcactcgtattctcagtgtgtctgtcattggaccccagccagtggcatctttgaaaatgagccattattatctttattgcttctggtcctgggcaagttagtcaccacagaaaagcgcttcctcaaggacagtttgtacaccgaaggaatcctaattgtatgggacccatccgtgtatcatgcagatatcccaaagtggtatcagaaaccagactacaatttcttcgaaacctataagagttaccgaaggctgaaccccagccagccattttatatcctcaagccccagatgccatgggaactgtgggacatcattcaggaaatctctgcagatctgattcagccaaatcccccatcctccggcatgctgggtatcatcatcatgatgacgctgtgtgaccaggtagatatttacgagttcctcccatccaagcgcaagacggacgtgtgctattatcaccaaaagttctttgacagcgcttgcacgatgggtgcctaccacccgctcctcttcgagaagaatatggtgaagcatctcaatgagggaacagatgaagacatttatttgtttgggaaagccaccctttctggcttccggaacattcgttgttgagtacctagccaggcacccttatccttctccatacgtcattttatggctactctcctggttaccgctgcttgaaggagtgtttttattcaacaggcccagcctgcttcctgcgctctagggaattttgttggcaagagttctggggcctccagcctgcctccctggggccaccgaggatgggagtccagattcttgccacactcattcctcctagacagcgtcctcctctccttctgcatgggtagggaaagatccacatttctcaccagggttgcgaaaactagactttgttttctccaactggatgatgtcatcctcgcaaggcagcacgtcctctgtggcttgaactctccctaggtattgatttcacatccgaaagaaattctcccagatcatgatttgtgtttcacagatgcagggtggcgggaggggagaaaaataattggggcaggatggggaagcctactcagttactccagaagggcgtcaaggtgctcccaactcccttgggacatagtcctgttgtcaccctgtctggctaggctgatccttaatgcaaaggaccctgggtgcttatgatttgggtagcccacttccaactccctgtggagatgaaaggtacaaaacctcctgatcacctgaccatctgtctccagcatggacgagagagacacccaacaggcagctaaaatgcaaacattccgtagcctgttgtctgtgtgctcctccctaagacacccaggaggggccagctctactgtgttcttgtagagctgcggcacggaggaagaagggatactggggaagctcttacaccttctgcgtcagaagatctcttttcattttcccctttatgaacactgtatggcctgttacattgatgttatatttggaggcccaaggagtttttgttaggaagtccctaccaccgtcagatgtagacagcaggttaaagtgctgccccacaagactggggttcttattttattttttttaaatgtctacctctcccctactaattgctattgttatcccaaaccttctccagcaggctcccctctcgaattttaatctttttctttaggggcaccccatcaactttccctgaccgtttgacaaatacccgaaaggtctctcagggcatggggagtatgtaataaatgattcttcccttagaatcttaatcattcctgggacttaggggggtgaagtgtgtgatcacagattgccaagcatacccaccctgtttggctctgggcaggaagcactgctcttcctggttccctcacaaggattttctgagatgtggagtggtttacctagcctctgatgaagccacagtgggcttctctaccaggtggcaataacctatggtcaaaactcaaggctggcacaatctgttcgattcaaggctactaagacttaatgctattgaacctgtgttctcacaggcttctgtttactgctgacctagagctcagaaactcagaccccactgtctcagtgtttcaagctgcttgccttattcgggcaatagaaagcccggagtgaaaagccctgggtttccaggttgacctctcacttcctcactgtgccactttgtttctgtatctgtaaaatgggggtgacaatcctacctcacagggctgtgtggggacaacaggaaaacatggctgcgatgtatgagaaccactggaaagcgcgtggctgggctgtgaccacagtgtataggaagtaggtaccctgctgtccttcctgtttccttatgaagaacctaccaggtgatcacacccgtgctgggccttgctacaagggagggcagtggagaggaacaggacattctttctgttgtgagacaactgcatcatttgcaatatgcaggggcctactatcttgttgcctgcaccccaggtctatttgtgctggggttgggggtgcacagagcattgagctgcttggccgctgtgtggaataaatctagagaattcctggctcacttcttctgatctcacacgctcattataaggcattaggactgtggatggagtggccaggaagttgatgttccttctgtcagcaagaggtacattagagatggagactacactgggtagattctagtttttaattcttattaatgtggggggaataaattaataagtataatatgattctgatgtctattagactttctctgtgctctttgtgagtaaggtgggccacggaggtatgagggcatcactgttagtttggtgaggtggttagtgactgatgtacaggaagtgtcttctacgtgggcactgacgtcagtagccatctatgcatcctaaatgcaggatcctcttgattctttctgccaatcaaatatatcgttgctcttggttcaggtttgtgtcagaaactttaaaaacatacctattaattctaaattatccaaagattatgtacaaattttaaaataaatgtctttttcag

SEQ ID NO: 1306 - DNA, 857 bp, Rattus norvegicus
accatcggaattgatttcaagatccgaactgtggaaatagaggggaagagaatcaaactgcaagtctgggacacagctggccaagaacgattcaagacaataaccacctcctattaccgtggagccatgggcattatcctagtatatgacatcacagatgagaaatccttcgagaatattcagaactggatgaaaagcatcaaagagaacgcgtctgctgaagtggagcgccttctgctggggaacaaatgtgacatggaagccaagcggaaggtgcagagagagcaggctgagaggttggcccgagagcacagaatccgattttttgagacaagtgccaaatccagtgtgaatgtggatgaggctttcagttccctggcccgtgacatcttgctcaagacaggaggccggagatcgggaaacagcagcaagccctcaagcactgacctgaaagtatctgacaagaagaacagcaacaagtgctccttgggctgagggacatttcttgcctcctattcaccctgaacctggaggctagacctgagggaggtggactgaggtagactgatggaaaacagaggggaggagctgtggtggtgcctggaggggtggatgacaggggaggaaggaaagatgaaatgggcagggaaaggagggcgaggaaccaaggacgtgaaaagtgaagagaaggggtttgagaagagaaaaagaagaaggtctcaggtctcggaccgtccaacattaatgtcagtatgctgatctctccattcctggttcagggttcgggtcccgagaggctggctcggccctactctgagggtctctcactccacagatgtttgttagtattaaaggcc

SEQ ID NO: 1307 - DNA, 774 bp, Rattus norvegicus
gccaccatggcaactacaccgtacaactactcttacatctttaagtatattattatcggggatatgggagtaggaaaatcttgcttgcttcatcaatttacagaaaaaaagtttatggctgattgtcctcacacaattggtgttgaatttggtacaagaataattgaagttagtggccaaaaaatcaaactgcagatttgggatacagcaggacaggagaggttcagagctgttacacggagctactatagaggagctgcaggtgcgctcatggtgtatgacatcaccagaagaagtacatataaccacttaagcagctggttgacagatgcaaggaacctcaccaacccaaacactgtaataattctcataggaaataaagcagatttggaagcacagagagatgttacctatgaagaagccaaacagtttgctgaagaaaacggcttattgttccttgaagcaagtgcaaaaacgggagagaatgtagaagatgcttttcttgaggctgccaagaaaatctatcagaacattcaggatggaagcctggatctgaatgctgccgagtctggtgtacaacacaaaccctcagccccgcagggaggacggctaaccagtgaaccccaaccccagagagaaggctgtggctgctagtgacctctttgctctggtccctcattttgacctttcacctcttgtctgttggaagcagtactttttactgccttcttgtcttctgtacatcttactggggtttaattaaaaaaaaaaaaa

SEQ ID NO: 1308 - DNA, 949 bp, Rattus norvegicus
gaattccggttttatagcaaggacattacattttcaggtacctaaagtcaaaattcaacacactgatataaaacttctatttaaaccaatagggttctgttatgatattgatctgttcacagtaacatttacaaaaagaggcagaggcagggggatctctgccccgcccccgcggtggcctgctgcctgccagccgctctccctcgctgacgccacctgcttcccgcactggacatggctggcaaggcacacaggctgagtgctgaggaacgggaccagctgctgccaaacctgcgggccgtggggtggaatgaactggaaggccgagatgccatcttcaaacagttccattttaaagacttcaacagggcttttggcttcatgacaagagtcgccctgcaggctgaaaagctggaccaccatcccgagtggtttaacgtgtacaacaaggtccatatcaccttgagcacccacgaatgtgccggtctttctgaacgggatataaacctggccagcttcatcgaacaagttgccgtgtctatgacatagatctaccctgcctcctatttccttaggggaaaggagaaggagtgactggaggaggaacccagggagggaaccaaggaggctggcccttgctccctgactcttgcggtgaccaccatctccgtcaggaggggtatgagtccctccctgtgcagaacgatgcccatgttcctggtgccagcctcctcactgggctctgccatgtttataatttgaataagctctcccattttctatagagttcctagcctcagttgtgtcccaggctgcctcttgctccttgtctaccggttctagttaattttccaagtagctgtgataaagcatgacagaaagtccaattcagaccctactaaaacaaaccccaatatattatggaaacagtgcttttatgccggaattc

SEQ ID NO: 1309 - DNA, 1314 bp, Rattus norvegicus
gaattccactctgcttcctcatgtgtctggattccgtactggagtcactgtgaggttaaaatataaataagggaagcattttctagaataccccaatgcttggagagcttccttttctttctttcctccaaatattcttaaagggatctggattctcctcggtgtcatgcagattctctctcaggtcccagttctgacagtgtaaatctttgggtccaagcccactcccaccgccttccctgtccccactgtggaacacagaccactccataccctagcctgtggcaactacctctgctgacagccattttgtcttcaactgcctagacccagtcctttcccaggttacccatacgcaatctcacactgactctgttcttcgtccccactggtccaaattggcagccttcctccaaagcaagcgcttagtgctctgagggtttttcccttgtgccttctcaatgatacttccttggctctcctttatgctccaatgaaaatgtcagccttggatttcccgaagttaatcaaaatcgcattcactattttgtctccggtatcacaagtgtcaatgggttgggaatgaaggctagcaggtgggctctgcccattgtctggctctagagaccccatgaaatgctggcaatttaaaggctctggacagagggaaggttcttcaataggacagcctttttcttttttttttttttttttttttcttcttttttttttttcggggctggggatcgaacccaggaccttgtgcttcctaggcaagcgctctaccactgagccaaatccccaaccccaggacagcctttttctgatacaggggttggagttatgaatcacttagtggggctaacaacatgaaactgggactatgtgtgaaagcatagatggtagggctatacggtaagaaaaagccgtgatggcttgttgtgaatcagtctcactgggtgagctttcttaagagcccaaagaagggcttcatgccaacccccatgtgtgtgtgccttctctggacttccttgacctttataccatcagaaattaatgtttaaccagaaaacaaggtttaaatgcaaggacagagaaatgcatcagttccaagctgtagtttgcagagctggactgagtggacctgtgaagaatccaaattccaaacaagtaagtagtatgttttgtcagacgataattgctgaaaaggcaccatttctattgtgtctcttgtgccctccatattactgaatgtgtgctgaaaggacgctctcctgagaatggggattattgatgacaaattatttcctctgt

SEQ ID NO: 1310 - DNA, 2042 bp, Rattus norvegicus
gaacataaagtcagattgctaaacttctgtgtcgactgaaaaacatggtgaagcgagttgcaattgtgggagctggggtcagtggcctggcctccatcaagtgctgcctggaagaaggactagaacccacctgcttcgagagaagctgtgacttgggaggactttggagattcacggaacatgttgaagaaggaagagccagcctttacaactcagtggtttctaacagcagcaaggagatgtcttgttactccgatttcccttttccagaagactacccaaactttgtgccaaattctctgttcctggaatatctccagctgtatgcaacccagttcaaccttctgagatgcatctatttcaacaccaaagtgtgcagtataacaaaacgcccagatttcgctgtctctggacaatgggaagtggtcactgtctgtcaagggaagcaaagctcagacacctttgctgctgtcatggtctgcactgggtttctaactaacccacatctgcccctggattcctttccaggcatacaaacttttaaggggcagtacttccacagccggcagtataaacatccagacgtatttaaggacaagcgagtccttgtggttggaatgggaaattctggtacagacattgccgtggaggccagtcacttagcgaaaaaggtgtttctcagcaccaccggaggggcatgggtgatcagccgagtctttgattcagggtacccctgggacatgatattcatgacgcgatttcagaacatgctcagaaatcttctcccaactccagttgtgagttggttgatatcaaagaagatgaacagctggttcaaccacgtgaattacggtgtggctccagaagacaggactcagctgagagagcctgtgctgaatgatgagctcccaggccgcatcatcactgggaaagtgttgatcaagcccagcatcaaggaggtgaaagaaaactctgtcgtctttaacaatacaccgaaggaggagcctattgacgtcatcgtctttgccactggatactcctttgcgttccccttcctcgatgaatcaatagtgaaagttgaggatggccaggcatcactgtacaagtacatcttcccggcacatctgccaaaaccaactctggccgtgattggcctcatcaaacccctgggttccatgatacccacaggagagacacaagctcgatgggttgttcaggtcctgaaaggtgcgactacattaccacccccgagtgtcatgatgaaagaagtcaatgaacggaagaagaacaagcatagcggatttggcttgtgctactgcaaggctttgcaatccgattacataacgtacatagatgacctcctgacctcgatcaacgcaaaaccggacctgcgggccatgctcctgactgacccacgcctggctctgagcatcttcttcggcccatgcacaccttaccatttccgcctgactggtccaggaaagtgggaaggagccagaaaggccatcttgacccagtgggaccgaacagtgaacgtcaccaaaactcgaaccgtacaagaaaccccatctacctttgaaactttgcttaaactctttagttttctggctttgcttgtggctgttttctttattttcctgtaagtgaaagatctaactggctttccaaatgtgtggagtataaccttccaacttctctaatgtaacaatttcaccttcgtaattgtaaaccacgtccagagacacccaacccctacctctccccaactcacctcattggcaccttcattgctgggtctcttgctagtccatcaggtttagtgcaagaaaataatgtccagcaattctgttcacttaaaatgttggaaggatccaggccccctttcaggaagaatctgcccccagagaggactctgagcattctttcaatctaaaaaactgctttccctagatcttaatgaaaagcccaacttcgcggaatattggtctgcactaaaatagttctctgtgtattagttgactacaaataaaatggaagaaact

SEQ ID NO: 1311 - DNA, 2257 bp, Rattus norvegicus
ggcacttaccgcttcgtgaaagagaatgagacgctgtacgcactgtgctttgtgccgtttgtgtgctggatcgtgtgcaccgtgctgctgcagcaaatggagctgggccgggatctgtctcgtacctccaagaccactacatctgtgtacctgctcttcatcaccagcatgctgaagtctgcaggtaccaatggaccccgggttcagggagagctgcgaatgctgtgccgcctggcccgggagggcatcctgaagcatcaagcacagttctcagaaaaggacctggagagattgaagcttaagcttcagggttcccaagttcagacaatgtttctcagcaagaaggagctgccaggagtgctagaaactgtggtcacctaccagttcattgaccagagcttccaggagttcttggctgcattgtcatacctactagacgctgagggagccccagggaactccgcaggaagtgtgcagatgctcctgaactctgacgcggggctgcgtggtcatctggcactcaccactagattcctctttggactgctaagtacagagaggattcgtgacattggaaaccattttggctgtgtggtgccagggcgtgtgaaacaggacaccttgcggtgggtacaaggacaaagccaacccaaggtggcgacagtaggagcagaaaagaaggatgagctgaaggacgaggaagcagaggaggaggaggaggaggaagaagaggaggaggaactcaactttggactggagctgttgtactgcctgtatgagacacaagaggatgattttgttcgccaggctctcagcagccttccagagatggtactggagcgagttaggctgacccgcatggaccttgaggttctgagctactgcgtgcagtgctgcccggacggccaggctctgagactggtgagctgtggactggtggcggcaaaggagaagaagaagaagaagaagagcttcatgaaccggctgaagggttctcaaagcaccgggaaacaacccccagcctccttgctgcgtccactctgtgaggcaatgattacccagcaatgtggtctgagtattctgaccttgtcacactgcaaactccctgatgcagtttgtcgagacctttctgaggctctgaaggtagctccttccctaagggagctgggcctcctccagaaccgactcactgaggcaggcctgcgtttactaagccaaggcctggcttggcccaaatgcaaggtgcagacactcaggatacagatgcctggcctccaagaggtgatccactacctggtcattgtgctccagcagagcccagtcctaaccactctggacctcagtggctgtcagctgcctggcactgtggtggaacctctgtgttcagccctgaagcaccctaaatgtggcctaaagaccctcagtctgacttctgtggagctgactgagaatccactgagagagcttcaagctgtgaagacattaaagccagatctggccatcatacattcaaaattgggcacacatcctcagcctctgaagggatgaagcagtgtcttctgagccccggagtccagaacaggatattgctgaagtcaacgttcttctgaatatgtctccccattcaaaagcaagtagatgccagcttctccctccaggcaagtctttcaagccaagaagccacagaagggcaagcaaaagacccaggtagatataggcacttaagagcccctggatatagacctggcacatgtcctgccccggacactcggaggttagtcttccctcagccccataaccgccaatacctccctttctgggcccaccaatctgtcccttgaagataatcccaacagtaacagaagtatttgttgtggtttgccctggagttatctgtattttgatgctacttccactgccccaaggacggctgcctagtctgtactcaggactcgggtgatttcaccagaaccttctccctatttaatttgtaaaataccaatgagggcaggtacaagatagaaggaggcctgtcattggatgagaagaaaggatgggtgggagaaacgtttgaaggaagaggaggagactggactggaaaggagaaagagacaggagggacagagaaagtagccatggcgggacaatgtggaagctgatgttaagattccaataagatcccacgctgtacctttataggttgttatgaatgttcttaagggatggatgtgtatggggctttgtatgtttaggtggg

SEQ ID NO: 1312 - DNA, 5153 bp, Rattus norvegicus
ccagctccgggatagcgcagagggctgtgacgaagagcgcacgaggtaccacggtatgcgtgtcggctcctggagctgagcagcagcgatgtggcacccggctctgggaccagggtggaagccgctgctggcgctggccgtggccgtgaccagcctgcgaggcgtgaggggcattgaggaggaaccgaacagtggtgggagcttccagatagtcaccttcaaatggcaccacgtccaggatccatacatcatcgcactctggatcctcgtggccagcttggccaaaatcgtcttccatctgtcccacaaggtcaccagtgttgtcccggagagtgctctgctcatcgttctgggcctggtgctgggcggcatcgtctgggcagctgaccacatcgcctccttcacactcacacccacactcttcttcttctacctgctgccccctattgtgttggatgctgggtacttcatgcccaatcgactcttctttggcaacctgggcaccatcctgctatatgctgtcattggcactatatggaacgcagctaccacaggattgtccctctatggtgtcttcctcagtggcctgatgggcgaactgaagatcggcctcctggatttcctgctatttggcagcctcattgcagctgtggacccggtggctgtgctggctgtgtttgaggaagtccatgtcaatgaagtcctgttcatcattgtttttggggagtcactgcttaatgacgcggtgactgtggtcttgtacaatgtgtttgagtctttcgtgacgctgggtggtgatgcagtgactggcgtggactgtgtgaaaggcatagtgtccttcttcgtggtgagcctggggggcactctggtgggtgtcatcttcgccttcctgctgtccttggtgactcgtttcaccaagcatgtgcgtatcatcgagcctggcttcgtctttgtcatttcctacctgtcctatctgacctccgagatgctgtccttgtcagccatcctggccatcaccttttgtggcatctgctgtcagaagtacgtgaaggccaacatctcagagcagtcggccaccaccgtgcgctacactatgaagatgctggcaagtggagcagagaccattatcttcatgttcctgggcatctcggctgtggaccccgtcatctggacatggaacacagcttttgtgttgctgacactggtcttcatttctgtataccgagccattggtgttgttctgcagacctggatcctgaatcgctaccgcatggtgcagctagagaccattgaccaggtggtcatgtcctacggtggcctgcgtggggcagtggcctatgccttggtggtacttctggatgagaaaaaagtcaaggagaaaaacctgtttgtcagcaccactctcattgtggtcttcttcacagtcatctttcagggcctgaccattaagcccctggtgcagtggctgaaggtgaagaggagcgagcagcgtgagccgaagctcaacgagaagctgcatggccgggctttcgaccacatcctctcagccattgaggacatctcaggacaaattggacacaattacctcagagataagtggtccaattttgataggaagttcctcagcaaagtcctcatgagaagatctgctcaaaaatctcgagatcggatcctgaatgttttccatgagctgaatttgaaggatgccattagctatgtggccgagggagagcgccgtgggtccctggccttcattcgctccccaagtacggacaatatggtcaatgtggacttcagcacaccccgcccatctacagtggaggcatccgtctcctatttcttgagggaaaatgtcagtgctgtatgcctggacatgcagtccttggaacagaggcggaggagcatccgtgacaccgaggacatggtcacccaccacacgttgcagcagtacctctacaagcctcggcaggagtacaagcatctctacagtcggcacgagctcacacccaatgaggatgagaagcaggacaaggagatcttccacaggaccatgcggaagcgcctggagtcctttaagtcggctaagctgggcatcaaccagaacaagaaggcagccaagctatataagagggagcgcgcacagaagcggaggaatagcagcattcctaatgggaagctgcctatggagaatctggcacacaacttcaccatcaaggagaaagatttggaactttcagagcctgaggaggccaccaactatgaagagatcagtggaggcattgaatttctggccagcgtcaccaaagatgtagcctctgactctggggcaggaattgataatcctgtgttctcccctgacgaggatctggacccaagcatcctatccagggtgccaccctggctgtcccctggggagactgtggtgccctcccagagggcccgtgtccagattcccaactctcccagcaacttccgccgcctgactccattccgcctcagcaacaaatcagtggattccttcctgcaggctgatggccccgaggaacagctccaacccgcttcccctgagtccacacacatgtgatacaggctctggcacaccacttactggacgcttgtctcgtcagtcatctgctgctgcccagcacgcattgctccctgcagggcttgcccacccacgtgccccaagccccgccccacctgagcgcacttcgactgtcacttttgcctctggtgttcctgggacagagccagagcaccgggccccacccagtgcccacgctcggtcggcggctgcgcgccgggtacacagtaggcgctcattccaaaagcctcgcccacgccgacgcccagctctgctaaaactcgcttctcttccgggctctacagaactgccactgcacgctctggagcaagaagagacgccgctgtgatcgctgcctggccgatggcccagctccgagggtctccctcagtggcccctccccaaccagctagtgttcttagggtccaacgcaccctaggagttttaatgcatagcctagccctaggaagaatcttttaatccatatggtgtcctcaggataccacattgccacctgccgtcttcttgccctggttcagttcctagggctctgtggtgctgcctccccacccctacccagaggcgagcccttgttagtgtttgccacccttattctgagaggagaaagatccatgagaggcctgtagcggacttaatcactgctggtacaaacaaaggtctcaaaaattgagatttgtagaagtggcaccacccaaatcaacctcattctaaataggcagcagttttttgtgcgtccccagaatatacacccctgtggccctatctgaccccttccaagttagttctccagactgccctatcaccttatgatcaactgcagaaatatttggctcttctagctcagactttcctgtccagccccttccagcctgggccttgccgtcaaaaacaaggtgtccggcctgaactatccctaagttgggaacactgcagatggccaggcaagctgggctaggggctagaagtggcccactggaagccttccttggtcaaaattatagccagctctggcatctatcaaaggagggctctacatcacccaggagtagaggaatgcaggaatccagtctctgaacattttgtcctgtccctaggtcttcagggcctccgccttagaacattggccctctggagggtaagaggctgggccctcagcccttatcaacttcctcagaagtccagtgttcaagagtcacctgagttttgcttccaactcactagaaactttgcctgcaccacagggagatcgagatggggctaaaggtggacttaatgacttcctggagacttctgaaacaaagcactcaggtctctgctcaggaaactaaatactgtgtctcaggaacaaggttgacagttaccttcagaggagtcacaggaaagtctgtcaatctgtattaatgctgcagttgatttgtagacaggaagagagctgggaggagtgaaagcaaagcaagtccgcccaacatactgcatctgcttcagagtgtcgcccccccccccaactgagcctgccagtatgctgttgactgtctagttcacactcagccatcagatgctcagcatctggtttccacagcccttgaagcatttgtccctttccgaattgaagtccagccactgacaatgccagggtcagtaatttcaccagactatttggagctgccatttggggtacttccaaggcaggctgtgcttggctactgtacccggggtgttctgagaggcatctatcagcctctgctctgcagacaagtttctcagacctttctgtgccaggacactgccttaacacctcatccaatctgctggacatggggtccaattcccactgcagaattagaagccaagtgtgacgagacagtgcctcagcaactgtcaccttgctccagatacccagagataccaaagctagcagccgggggtgatcaatctgtggaaccctttgacactctgtccatgttttagctgtgcacaggccatgtcctttgagtgtgtgaactacaccactgggcatagccatatggaacagtcttgacaagaaagcctcattcacaaaaccccacttcctgtacctaaatgatacatacagtggctacatttcatagttgaggaccctcttgttcttgtcattgttgtacaatagaatgtaaaatcctatgaatgtatttccttaggaaaactattgtaaaagttttttttttattaggagagaatttctatttatttaatactgaactttgacctactttgtggtactacaaagtatacaaatttaggaaatttgtatttccgcttctgtattttcttgaaaataattttattacagtgttcaatatactatgtattaataatctttttatgaaaggaaatttaaagaactcatcaaaaccagaaatatattttgagtggttaaaattgtgtattaatgttgtgaacataatcatagttgaactttaattctgatctcagaataatgtgccttaaaatgcccccatgtgttgggcagcatctgtacaaggagtccattagcaaagctgcagtgact

SEQ ID NO: 1313 - DNA, 1341 bp, Rattus norvegicus
tatatagcgttcagtcctcctgctgtgactatcacctgggggactcacctgcctgcacctttagccagcacctacagacagtacctgtgccagaccccagcaatggtggaccatgcgcccttcgaaacggatatcagcaccctgacccgcttcgtcctggaggagggcaggaaggctgggggcacgggcgagatgacccagctgctgaattcgctctgcaccgcgatcaaagccatctcgtcagcggtgcgccaggccggcatcgctcagctctatggcatcgctggctcaaccaatgtgactggggatcaagtgaagaagctggacatactttccaatgacctggtgatcaatatgctgaagtcgtcctatgctacctgtgtccttgtgtcggaagaagatacacacgccatcataatagagcccgagaagaggggcaaatatgttgtctgttttgatcccctcgatggctcatccaacatcgactgcctcgcgtccatcggaaccatctttggcatttacagaaagacatctgctaatgagccttcggagaaagatgctctgcagccaggcaggaacctggtggcagcaggctatgcactctatggcagcgccaccatgttggtcctggccatgaattgtggcgtcaactgcttcatgctggacccgtccattggagaattcattttggtggacagggatgtgaagatcaagaagaaaggtaacatctacagcattaatgagggctatgctaaggactttgaccctgccatcaatgagtatatccagaggaaaaagttccctccggataattcagctccctatggtgcccggtatgtggggtccatggtggctgatgttcaccgcactctggtgtatggagggatcttcttataccctgccaacaagaaaaatccatctggaaagctgcggctgctgtacgagtgcaatcccatcgcttacgtcatggagaaggccggtggacttgccacgacggggaatgaagacatattagacatcgtccccactgagatccaccagaaggcaccagttatcatggggtccaccgaagacgtgcaggagttcctggagatctacaataaggacaaagccaaatcaaggccgtccctgcccctgccccagagcagagctcgagagtcaccggtccattctatctgtgacgaacttttctagaaacaaacccaacagcgcggatagtttcagggccgaatgccttgcaatgcccaaggttgcctcgcctagatgctataatgccactgtatcaggtactatatatttcgaataggtgaaggagaaataaacatattcttccttcataaa

SEQ ID NO: 1314 - DNA, 787 bp, Rattus norvegicus
cagtgcttctagatcctgagccctgaccagctcagccaagaccatgaccgagcgccgcgtgcccttctcgctactgcggagccccagctgggagccgttccgggactggtaccctgcccacagccgcctcttcgatcaagctttcggggtgcctcggtttcccgatgagtggtctcagtggttcagctccgctggttggcccggctatgtgcgccctctgcccgccgcgaccgccgagggccccgcagcagtgaccctggccaggcccgccttcagccgggcgctcaaccggcaactcagcagcggtgtctcagagatccgacagacggccgatcgctggcgcgtgtccctggacgtcaaccacttcgctcctgaggagctcacagttaagaccaaggaaggcgtggtggagatcactggcaagcacgaagaaaggcaggatgaacatggctacatctctcggtgcttcacccggaaatacacgctccctccaggtgtggaccccaccctggtgtcctcttccctgtcccctgagggcacactcaccgtggaggctccgctgcccaaagcagtcacacaatcagcggagatcaccattccggtcactttcgaggcccgtgcccaaattggaggcccagagtcggaacagtctggagccaagtagaagccttcagcttgctacccatccccagtagccgtcaccagccctccctctctgtcaatcgatatgctcttttgatacatgtactttctgaaaaactcaaataaaagttggaaactactgctc

SEQ ID NO: 1315 - DNA, 3295 bp, Rattus norvegicus
aagcttgctgatgtctgattggccacttaacactacgtaggcacatgctctagaaaagtgggccgccgtagattttatcagctcacaaggtttcttcggaaaatatggtctaaagttttttccaaagcgtaaagtagaaccactagatttgtggtggaaaatgaaatttgcttatttacaatcggaacttataatttttaactttttaatgttctttggatttttgtttttttccaggtcaagtggatttcgaatagtgtctgagaccaactcaacccagaaaaacaaaatggcccttaactcttctgctgaagatggtatcaaaagaatccaagatgactgccccaaggctggcaggcacagttacatatttgtcatgatccctaccctctacagcatcatctttgtggtgggaatatttggaaacagcttggtggtgattgtcatttacttttacatgaagctgaagactgtggccagcgtctttcttctcaatctcgccttggctgacttatgctttttgctgactttgcccctgtgggcagtctataccgctatggagtaccgctggcccttcggcaatcacctatgtaagatcgcttcggccagcgtgagcttcaacctctacgccagtgtgttccttctcacgtgtctcagcatcgaccgctacctggccatcgtccacccaatgaagtctcgccttcgccgcacgatgctggtggccaaagtcacctgcatcatcatctggctgatggctggcttggccagtttgccagctgtcatccaccgaaatgtatacttcatcgagaacaccaatatcacagtgtgcgcgtttcattatgagtctcggaattcgacgctccccatagggctgggccttaccaagaatattctgggcttcttgttccctttccttatcattctcaccagctatacccttatttggaaagctctaaagaaggcttatgaaattcaaaagaacaaaccaagaaacgatgacatctttaggataattatggcgattgtgcttttcttcttcttttcctgggtcccccaccaaatattcactttcctggatgtgctgattcagctgggcgtcatccatgactgtaaaatttctgacatcgtggacactgccatgcccatcaccatctgcatagcgtattttaacaactgcctgaaccctctgttctacggctttctggggaagaaatttaaaaagtatttcctccagctcctgaaatatattcccccaaaggccaagtcccactcaagcctgtctacgaaaatgagcacgctttcttaccggccttcggataacatgagctcatcggccaaaaagcctgcgtcttgttttgaggtggagtgacaggttcaaagcacactggcaatgtaatgccctgacagaagccagggcagcctctgactaaatggcttacgaccaaaggaccattcaccctgcctcaggatctaagcagaaaatgcgctcatcagactgtagataatgactaaaactctgagagaagactttgaaggagtaaccaagcaaagccgtcttgcattaatagatgatggctagccaaaggaagagtcaggagctggatggattggtgggtctggaaaacagttcgctggcagaaatgcaatctcatcagtctccctttgctatgttccttttgatttccacacgtaggtatgtggcccatgctaaatatttaggcaagaaacaagagatggaaatcaaggtcacttgttctgttcaactcccaaagggcaaggaacctttgttgtccctgtagtcattagcagtggagacccacttgtcactgttactacacctatcgtgcaaagatttgctaatctgtagttatcaagtttcaggactcctttgtaaaattcagccagtgttttagaaacatgtactgtccccagacaatgctagccagtggtgtacttatgtagcagtgttacccaagtccacacatcaaagtcacactgctttaataacgtgacatactaggtacatctgcgttatttcgcatctgagaaatgtacacagtcagaggtgaatacactatattccatacagtctgccttgctctctaaaaatatatattctccacatacgtgaacatctttatctctaaactgtcatttgatgaaattttggcaatgtatgtttacctctaaataaagtaattttattgtaatgtatctaatcttcattatttaaaatagaagcctatctatttttacaatgacatggatagaagtaaaaatacaaaattacaataatgcatttttacttcaagtttgatctggttgatagtttaatatggttagatataggttttatatcccactgttgaaaaaatcatgaaggccagcttgtaccccacaatgtagggaagatacaacatttttaatttttttagttattcatataacagcaaaaacattttcattgctattaacattaaattaatacttttttttactcataagttttggttacatctagttacatgcatggtaattgcaggaaatatagaagctctggaaaacacaaagcaatagtcatatttagttcttcagtgcaaaaatactccattttagtattttagcccataagtaggaagcagagggtgacttgtaaggcctcatgtcttctgcaacctcaaagcccaccccagtgacagatacatgtgcttcaccaggtatgtcagacttactaatcccccagtcctgcccagccaccaactggggatcaagttttcatactcactatacatacatacatatgtaaattatggtgttagagccataatgtatatacaattctgtatataggcttgtccctcagtgtcattgcagagtacttagtataccattcaatgtatttcctcaaacattccagtactgttaaaaaacacaagcacacctgataacattagggaatcaccaaattggagcatttaccattcttctaaaaatactttgggcactagaagtcaccctgagctgatcaagcacacaaatctgataaactccaagaagaagcagaactgagaatatggttataaacgtttttcgtattcccaatatgtaagagcacgttttccagaaagtataacacaacttatatacgctaccagctatgtttagctgtagctcatggcaagctcagtggagaggagttcacttcctctaagaacccaggtgctgtaggctagaacaggaaacaaactagaccagaatattgccatggggcggctgcctagtcaccagaaagctt

SEQ ID NO: 1316 - DNA, 2364 bp, Rattus norvegicus
ctaaaccaacaggtttctgcgacctcagcaaatcccagcatgccttcagggacatcccagtgtgaagatggctctgcagggtgcccccaggacttggaggtacagccagaaaaagggcaactggagaagggagcctcaggggacaaggaaagagtctggatctcgcctgataccccaagcagatgtacttggcagctgggcaggcccatggcggattccccacattaccacacagtgccgacaaaatccccgaaaattttgccagatattctgaggaaaattggcaacacccctatggtcagaatcaacaggatctccaagaatgcaggactcaagtgcgagctgttggccaagtgtgagttcttcaacgccggtgggagtgtgaaggaccgcatcagcctccggatgattgaagacgctgagcgagccggaaccttgaagcccggagacacgatcattgagccaacttctggcaacacagggatcgggctggctctggcagctgctgtgaagggctatcgctgcattatcgtgatgcctgagaagatgagtatggagaaggtggatgtgctgcgagctctgggagctgagattgtgaggacgcccaccaacgccagattcgattcccccgagtcccacgtaggagtggcatggcgactgaagaacgaaatccccaattctcacattctggaccagtaccgcaatgccagcaaccccttggcgcactacgatgacaccgcagaggagatcctgcagcagtgcgacgggaaggtggacatgctggtggcttcagcaggcacgggtggcaccatcacgggtatcgcgaggaagctgaaggagaagtgcccaggttgtaaaatcatcggtgtagatcccgaggggtccatcctcgcggagcccgaggagctgaaccagacggagcaaacagcctatgaggtggaagggatcggctacgacttcatccccaccgtcctggacagggcggtggtggataggtggttcaagagcaatgatgacgattccttcgccttcgcccgcatgctcatctcccaggagggactgctgtgcggtgggagttcaggcagcgctatggccgtggctgtgaaggctgcccaggagctaaaggaaggacagcgctgtgtggtcatcctgcccgactctgtgcgcaactacatgtccaagttcttgagtgacaaatggatgctgcagaaaggcttcatgaaggaggagctctccgtgaagagaccctggtggtggcatctgcgtgtccaagagctgagcctatcagcaccgctgaccgtgttgcccactgtcacctgtgagcacaccatcgccatcctccgggagaagggttttgaccaggcacctgtggtcaacgagtctggtctaagacagtccaaagatatttgccatccaacgaagaggcacataatccaagcacatggcctgagaaaagttccagacaccgaagcctgatgaggtttcctagcaacagagccagggccatcctagggatggtgactctcgggaacatgttgtcctccctgcttgctgggaaggtgcggccatcagacgaagtctgcaaagtcctctacaagcagttcaagccgatccacctgaccgacacactgggcatgctctcccacatcctggagatggaccacttcgccctggtggtccatgagcagatccaataccgcaacaatggcgtgtccagcaagcagctgatggtgtttggtgttgttaccgccattgacctgctaaacttcgtggcagcccgtgagcagacccggaaatagagttcagaagtcaggactggcttccatcctccctgctgggacttcttggctttcagagacaccgactggtttccacacccaagtccagcaggtggctgctgaggccagcaccctcccctcctaacgctcagctccctataggaatcctctatgtccgagtagcttacgtgggctttcctctggtgtcccagaaccaaggaatggcagccaggaaagataggcacagactacactcgccacaagactcagggtgcctaggaaagtgtcctctccagagagggctccagcctgagaaagggcaaaccctggactgactgtgctcatcctcagggggcagtgctggccccagcaagggagcatgtgggttttaaatgaaggtgcgttccagtgacctgagacccacagctgtgaagtaaacgtcgtgcctgtacggagtgtcaccacctgggtcatgaccctgcttagcagttcctcctcacatctccctcctttcccgacaagcacctactttctgtctcaactcttcctataaatgaatcacatacctgtggtcatgtctacctaa

SEQ ID NO: 1317 - DNA, 2290 bp, Rattus norvegicus
gagcttgcaactttgaaagccacagtatggatgcccggcattggccctggtttctggtttttgccacatttctcctggtttctggcttgccagctccagaaaagtttgtcaaagacatagatgggggaatcgatcaagacatattcgatatcaatgaagatttaggactggaccttttcgagggagacatcaaactggaggcaagtgggaggaattccatcattggagacaactacagatggccacataccattccatatgttctagaagacagcttggaaatgaatgctaaaggagtaatcctcaatgcgttcgagcgctatcgccttaaaacgtgcattgacttcaagccctggtctggagaagagaactatatatcagtgttcaagggcagtgggtgctggtcttcagtgggaaacattcacgctgggaagcaagagttgtccatcgggacaaactgtgacagaatagcaacagttcaacatgagttcctccacgccctgggattctggcacgagcagtcgcgtgctgaccgagatgattacatcactatagtttgggacaggatcttgtccggcaaggaacacaatttcaacatctacaacgacagtgtgtctgattccctgaatgtcccatacgactacacctcggtaatgcactacagcaaaaccgctttccagaatgggacagagtctaccatcattacgaaaatctcagactttgaggatgtgattggccaacgaatggacttcagtgactatgaccttctgaagctgaaccagctgtacagctgcacttcttccttgagttttatggactcctgcgattttgagctggagaatatctgtggcatgatccaaagttcacaagatagcgctgactggcagcggctttcacaggttctcagtggtccggagaatgaccactccaacatgggccagtgcaaagactctggcttctttatgcacttcaacactagcactgggaatggggggatcacagcgatgctggagagcagagtgctgtaccccaagagagggtttcagtgcgtggagttttatctgtataacagtggaagtggaaatggccaactgaacgtctacacccgggagtacactgcaggccaccaggatggcgttttgacccttcagagagaaataagagacatacccactgggagctggcagctttactatgtaacactgcaagtgactgaaaaattccgagtggtgtttgaaggcgtcggaggccctggcgcatcatcgggtggtctgtctatcgatgacatcaatctctcggaaacaaggtgtccccaccacatctggcacatacagaatttcactcagcttcttggaggccagaccactgtatacagtcctccattttattcctctaaaggttacgcttttcagattaacctggatctaacatccccgaccaatgtagggctttatttccacctgatctccggggccaatgacgatcaattacagtggccgtgtccttggcagcaagccacaatgacactcttggatcagaatcctgacatccggcagcgtatgtccaaccagcggagtataaccacagacccaaagatgaccgatgataatggaagctatctttgggacaggccttccaaggtgggagtggaggcttttttccctaatggaactcagtttagcagaggcagaggctatggaaccagtgtcttcataacccaagagaggctgaagagcagagagttcttaaaaggagatgacgtttacatcttactgacggttgaagatatatctcacctcaattctacagcggctgtcccagggccagtccccaccacctcgactgtccataatgcctgctctgaggtcgaatgtcagaacggcggcatctgcactctccaagaaggcagagctgagtgcaagtgtcctgcaggagaagactggtggtacatgggcaaaaggtgtgagaagagagggtccaccaaggacacgattgtcattgctgtgtcttccacggtcaccgtgtttgccgtgatgctgatcatcacccttatcagcgtctactgcacccggaggaaatatcgtaagaaggctagtgcaaagacagcagccatgaatctagaaaaccaacatgcgttttgaatattaactcgtgccagcaggtgaaacaaaaagaaaccttctgtcgtcgtagaagaatatttcgcccaggctgtgcgacgacattcacagcatttcaaaccagaccatctctgtaaatagctgagtgcctaataaaccattattttggt

SEQ ID NO: 1318 - DNA, 502 bp, Rattus norvegicus
cggatggttaccgtgtcattcatgatggctacggtgcccatccggaccaggaagttcatgacaaaccgtctgcttcagaggaaacagatggtcattgatgtccttcatcctgggaaggccacagtaccaaagacagaaattcgggaaaagctggccaagatgtacaaaaccacaccagatgtcatctttgtatttggattcagaacccactttggtggaggcaagacaactggctttggcatgatctatgattctttagattatgcaaagaagaatgagcctaaacacagacttgcgagacatggcctttatgagaagaaaaagacctcccgcaaacagcgaaaagaacgaaagaacagaatgaagaaggtcagggggactgcaaaggccaatgttggtgctggcaaaaagccaaaggagtagttctacggtgacttgatgttctgctgtgatatcgaaatttctgagggtaaaataaactaaaaaacgttctgcgagtctg

SEQ ID NO: 1319 - DNA, 1898 bp, Rattus norvegicus
taagtacctgagggtaaggtgttgttctctctcatatggtcatatagtcttctgagtagtctaaacctcattatatgacccaaactggctttgaactctttttttttttttttttttttttttggttctttttttcggagctggggaccgaacccagggccttgcgcttcctaggcaagcgctcactgagctaaatccccaaccccggctttgaactcttgatcttgttgcctcaccacttcgaagggctggaaaaataagtgacctcacctagctagaatcagagatgtaagaagtgctttgccagagttggaaataggaagctgcgaggctggttattccaggatcttaataacaacatcagccagaagtacttgaagtgctacaaacaggaagtagatagccgaattcccagacttttggtctggatgtactgacaccgcccaccgctcggtgggctgatggccctcgcgccaccctttcattggccagtcgtcacaaggcccatactcacacgaggtcattcagccaatcagcgaactcggcctcgcccatcatgaggcgcaagtgtcttacttgcggcttggtccgcggcaggctgggagtcgtagtattatatttgggttctgcctactgagccgggagtctgggaactacaactcccagagtgctgagcggatgcacgctctgcttttaggtgtaagccgcaaacatcttggaccccgggagaatccgcgttgaagcacagagcatttagctcctctgtcagaatgaatggggaccagaaactggatgttcataaccaagaaaagcagaatttcatccagcacttctcccagattgtcaaggtgctgactgaggatgaactgggacacccagagaagggagatgctattacccggatcaaagaggtcctggagtacaacactgtaggaggcaagtacaatcggggtctgacggtggtacagaccttccaggaactggtggaaccaaggaaacaggatgctgagagcctacagcgggccctgacggtgggctggtgtgtagaactgctccaggctttcttcctcgtgttagatgacatcatggactcttcctacactcgccgggggcagatctgctggtatcagaagccgggcataggcttggatgccatcaacgatgctctgcttctggaagccgctatctaccgcctgcttaagttctactgcagggagcagccctactacctcaacctgctggagctctttctacagagttcctatcagactgagatcgggcagactctcgacctcatcacagcaccccagggccaagtggatcttggtagatacactgaaaagaggtacaaatctatcgtcaagtacaagacagctttctactctttctacctgcctatcgcggctgccatgtacatggctggaattgatggggagaaggaacacgctaatgccctgaagatcctgctggagatgggcgagttcttccagaaccaggacgactaccttgatctctttggagaccccagtgtgaccggaaaggtcggcactgacatccaggacaacaaatgcagctggctggtggttcagtgtctgctacgagccactcctcagcagcgccagatcttagaggagaattatgggcagaaggacccagaaaaagtggcgcgggtgaaagcactgtacgaggagctggatctgcggagtgtgttcttcaagtacgaggaagacagttacaaccgcctcaagagtctcatagagcagtgctccgcgcccctgcccccatccatcttcctggaactagcaaacaagatctacaagcggagaaagtaacctcgaattgtagaggctgcgagggaggggtctcaataaattattgttcaacaaaaaaaaaaaaaa

SEQ ID NO: 1320 - DNA, 2793 bp, Rattus norvegicus
acagccgagaatgggagtagggcggagtgtttgagcagcacacccatttcctctccgctcttcgtctcgttctcgtggcctgtccacccatccatcatctgccggccaccgctctgaacaccttccaccatggccacctcagcaagttcccacttgaacaaaggcatcaagcagatgtacatgaacctgccccagggcgagaagatccaactcatgtatatctgggttgatggtaccggggaagggctacgctgcaagacccgtactctggactgtgaccccaagtgtgtagaagagttacccgagtggaactttgatggttctagtacgtttcagtctgaaggctccaacagcgacatgtacctccatcctgtggccatgtttcgagaccccttccgcagagaccccaacaagctggtgttctgcgaagtattcaagtataaccggaagcccgcagagaccaacctgaggcacagctgtaagcgtataatggacatggtgagcagccagcgcccctggtttggaatggaacaggagtatactctcatgggaacagacggccaccctttcggctggccttctaatggcttccctggaccccaaggaccctattactgcggtgtgggagctgacaaggcttatggccgagatatcgtggaggctcactaccgggcctgcttgtatgctggaatcaagatcacagggacaaatgccgaggttatgcctgcccagtgggaattccagataggaccctgcgaagggatccgcatgggagatcatctctgggtagcccgttttatcttgcatcgggtatgcgaagactttggggtgatagcaacctttgaccccaagcccattccagggaactggaatggggcaggctgccacaccaactttagcaccaaggccatgcgggaggagaatggtctgaggtgcattgaggaggccattgataaactgagcaagaggcaccagtaccacatccgtgcctacgaccccaaggggggcctggacaacgcccgccgtctgactggattccacgaaacctccaacatcaacgacttttccgctggcgttgccaaccgcagcgccagtatccgcattccccggattgtcggccaggagaagaagggttactttgaagaccgtcggccttctgccaattgcgacccctatgcggtgacggaagccatcgtccgcacgtgtctcctcaacgaaactggcgacgagcccttccaatacaagaactaagcggactcgacttccagtgatcttgagcccttcctagttcaccccactcccaactgttccctctcccactggtccccactgtaactcaaaaggatggaataccaaggtctttttattccttgcgcccagttaatttttgcctttattggtcagaatagaggggtcaggttcttaatctctacacacccaaccccttctttcctagctagctttccagtgggggaacgggagggggtggggaagggtaacccaccgcttcatctcagcgggaatgcatgtcctgtaggcatagctgtcacaaatcgggtgtacttgtggtgagggaggactggttttttttttccttcaggataattgaaagggcaggcccaacagcttagattaacattttctctgtcagtagagagctgttatttcttccggtgaaaccagctttctattgaagtctggtgaggagttggaggttggtctcttggcttccttagcttagggaaggggagttcaccctcccttcatgaaacacagttcacctgacaaatggccctactgtaaaggaagaaaaaagtttcttggtcctccatttataactcaaagcagagtagtatttttatatttaaatgttaaaaacaaaaaagttatatatatgggtgtgtggatatatatgtcttttctaattgagaaaaccatcctattccctgggtgccaagtttgagtgaggagctcggtgtagaagtgaggcactcttgaggtaggggtggggatgcagtactgggaaagttggttatcttgggggttcagcttcattactacttagggtttccctgcccactctgcaggagcagatgttggacaggtagccagtgggatgccactgcttgccgccactgtccctgggcttagtttaaggggacgtgtatacctaatccacacacgagttagaagtatgagttggctggtcaacttgaacattgttacaggcgggtgggtgttagtggggggttattttttggtgggactagcatgtcactaaagcgggccttttgatatattaaattttttaaagcaaaacaagtttagattttaatcaagttcgtagggtttctaactttacagaattgcctgtttgtttcaatgactccttccacttggctcttaggggaactgaggacaggcctggagttaatacacttgtcattctgtgtcctagtgtcctcttcctccggcagactgtccccttccttctgaaaaagccgatagagtcttgttttatttttcttttataataaacacaccccacctccatcccagcttgttgccttgcagttttctggatgtttgtgtcggcagcaggcagctgtggtttttttctcttgccacgatgactctaattaccatgtatagtatgttcagttagataactcactgtaaacagactgtaactgagagcagagcttgtaaatcaacctaacgtttataagatttcctctgacttgtttctttgtggttccaaaaaaaaaaaaaaaaaaaaaaacctcaaaaact

SEQ ID NO: 1321 - DNA, 507 bp, Rattus norvegicus
tttagatttatttgtttactttgagtgttttgcctacctgtatgtatgcaccatgtgggtgctgggagtcaaacgcagagctctgggaaagcagcaagtattccagactgctaagccgtctctcccacccctcataattaattctcaacaggcagttgccaaacaaatagaaagaagctattaaaactcctgtttcttttgtagcgtgctcttcaggatcccaatgttgctgctttcatggtggagcccatccagggtgaagcgggtgttatcgttccagatccaggatacctgacgggagttcgagaactttgcacccggcaccaggttgtcccactcactttgcagtgacgccaggctcgcctgcacttgtttggactctgctgacaggctagatgatggattccaaggcttgaggaacatgctaatgcttgcaccttctgaggaacacgctaatgcttgcaccctctgaggaacatgctaaatgcttgcaccttctgaggaaca

SEQ ID NO: 1322 - DNA, 2059 bp, Rattus norvegicus
ggcaggagaagtgatctgttatctcacctggcacatgaagcccattcctggaactatgcaaagggcagagtctggtgagccatggcggcggcagtggcggcagcagcagcagtgcggtcccggatcctgcaggtttcttctaaagtaaactccacatggtatccagcatcttctttctcttcatcatcagtgccaactgtaaagctcttcattgatgggaaattcgttgaatccaaaagtgacaaatggattgacatccacaacccagccaccaatgaggttgttggtcgggttcctcagtccaccaaagctgaaatggaggcagccgtagccgcctgcaaacgcgctttccctgcgtgggcagacacatctattttaagccggcagcaggtcctgcttcgttatcagcaactcattaaagaaaacctgaaagaaatcgccaggttaatcacattggaacaagggaagactctggctgatgctgaaggagatgtgttccgaggccttcaggtggttgagcatgcctgcagtgtgacgtccctcatgctgggagagaccatgccatctattaccaaagacatggacctttattcctaccgcctgcctctgggagtgtgtgcaggcatcgcaccatttaattttcctgccatgatccccctttggatgtttcccatggctatggtctgtggaaatactttcctaatgaaaccatcagagcgagtacctggagcaaccatgcttcttgctaagttgcttcaggattctggtgccccggacggaacactgaacatcatccatggacaacatgaagctgtaaattttatttgcgatcatccagacatcaaggcaatcagctttgtgggatccaaccaggcgggagagtacatcttcgaaagagggtcaagaaatggcaagagggttcaagccaatatgggagccaagaaccatggggtagtcatgccagatgccaataaggaaaataccctcaaccagctggttggggcagcatttggagctgctgggcagcgctgcatggctctttcaacagccgtccttgtgggagaagctaagaagtggctgccagaactggtagagcgtgccaagaatctccgcgtcaatgcaggagatcagcctggagctgatcttggtcccctgatcaccccccaggccaaagagagagtctgcaatctgattgatagtggagcaaaagagggggcttccatccttctggatgggcggaaaattaaagttaagggctacgaaaacggtaactttgttggaccaaccatcatctccaatgttaagccaagtatgacttgttacaaagaggagatttttggtccagttcttgtggtcttagagacagaaaccctggatgaagccatcaagattgttaatgacaacccatatggaaacgggactgctatctttaccaccaacggagccatagctcggaaatacgctcacatggtggatgtgggacaggtgggcgtgaatgtccccattccagtgcctttgccaatgttttccttcaccggctctcgatcttccttcaggggagacaccaatttctatggcaaacagggcatccagttttacactcagttaaagactatcacatctcagtggaaggaagaagatgctactctttcctcacctgcagtggtcatgcctaccatggggcgttagaacgttcaagactccatccagcctgagtaacttcccactgtccttggcaatcttcgtctgccatctttgctcaaaacagatccatgaggatggagtatattgcaatgaaattctttctcagaactcgcaatcccttcaaagttatagggagtacaggataacaccaacgccaggccttcacttgttctccatacttctctacggtttttgaggttaactgttgttaagcgtgaagtgtttgcctagaataagagcttagaactgtcttctaacaattcttttctgatgacttggagggacaacgtaggggcccggtccttggcaatcttcgtctgccatctttgctcaaaaacagtccatgaggatggag

SEQ ID NO: 1323 - DNA, 1977 bp, Rattus norvegicus
gtcctcctctgggacagggaaggatgtcacagctgagcctctcctggctgggactggggcctgaggtggccttcccatggcagaccctgctactgtttggagcctcctggatcctggcccaaattctgacccagatctacgctgcctataggaactttcgtcgcctccgtggcttccctcagccccccaaacggaactggcttatgggtcatgtgggcatggtcactcctacagagcagggcttgaaggaattgactcggttggtgggtacctacccccaaggctttttgatgtggattgggccaatggtccccgttattactctgtgccactctgacatcgtccgatctatcctcaatgcctcagctgccgttgcgctcaaggatgtgatattctacaccatcctcaagccttggctgggggatgggctcctggtgagtgctggtgacaagtggagccgccaccgccgcatgctgacacctgccttccacttcaacatcctgaaaccctatgtgaagattttcaacgacagcaccaacatcatgcacgccaagtggaaacggttgatttcagaaggcagttcccgtctggacatgtttgagcacgtcagcctcatgactctggacagtctgcagaaatgtgtcttcagctttgacagcaactgccaggagaagtccagtgaatatattgctgccatcctggagctcagtgccctagtggccaaaaggcaccagcagcctttgctgttcatggacctgctgtacaatctcacccctgatgggatgcgcttccataaggcctgcaacctggtgcatgaattcactgatgccgtcatccgggagcggcgccgcaccctcccagatcagggtttggatgagtttctcaagtctaaggccaagtccaagactttggatttcattgatgtgctgctcctgaccaaggatgaagatggaaaggagctgtcggatgaggacatcagagcagaggccgacaccttcatgtttgagggccatgacaccacagccagtgggctctcctggattctatacaacctggcgaacgacccagagtaccaggagcgctgccggcaggaagttcaggagcttctgagggaccgagatcctgaggagattgaatgggacgacctggcccagctgcccttcctgaccatgtgcatcaaggagagtctgcggctgcaccccccagtcacggtcatctcccgatgctgcacccaggacattctgctcccagatggcaggaccattcccaaaggtatcatctgccttatcagtatctttggaattcatcacaacccgtctgtgtggccggaccctgaggtctacaaccccttccgctttgaccctgaaaacatcaaagacagctcacctctggcatttattcccttctcggcggggcccaggaactgcataggtcagactttcgccatgagcgagatgaaggtggcgctggcactaacactgctgcgcttccgactcctaccggacgacaaggaaccgcgcaggcagccagagctgatcctgcgtgccgagggcggactgtggctgcgggtggagccgctgacggcgggcgcgcagtgacctcacagttggtctggagcacccccaccatcctacctctgaggatcccagaatgaacagaactgtcacccataccagaatcttacggagggccagcagggggcgctgtgaatccagtgagtgggtgagagaggccagttagtgtctgagccaaagacctttgacttcgtctaactgatcgccagcctttatcataaggtgcattcttctccaaccaacctggactattctctggacaataggaagccaaagaaacgtctgagcaagagaccagaatgaaacgcaaatttgagctcttattctcgcagcaaatcccttattcagctccatttccattattttgacctacattcaaatcatctaataaatacattctctc

SEQ ID NO: 1324 - DNA, 1867 bp, Rattus norvegicus
agctttgcttctcagtggaaaagtaattttaacaagcaatttagtagttgattgagcaaatgcattgcaaaaaagaatgcttttgggacagcgttttcttcagagggagtacccagagctggcactcctgagccagtggcccagcatccagggagagatatgcttgtcatcaccgaagcctgatgctgtagagccacaccctggtattggccaatctgctcacacaggacagcgagagcaggagccaggcagagcataaaaggtggggcgggatcagtcgctcctcacatttgcttctgacatagttgtgttgactcacaaactcagaaacagacaccatggtgcacctgactgatgctgagaaggctgctgttaatggcctgtggggaaaggtgaaccctgatgatgttggtggcgaggccctgggcaggttggtatccaggttacaaggcaagtagaagtttggtgcttggagacagaggtctgctttccagcaggcactaacttttattgtatcctggctatgtttccctttgtaggctgctggttgtctacccttggacccagaggtactttgatagctttggggacctgtcctctgcctctgctatcatgggtaaccctaaggtgaaggcccatggcaagaaggtgataaacgccttcaatgatggcctgaaacacttggacaacctcaagggcacctttgctcatctgagtgaactccactgtgacaagctgcatgtggatcctgagaacttcagggtgagtctgatgggctcctcgctgggtgtccttcctgtggctttcctgctcaaattcctatcagaaggaaagaggaagccactctagggagcagttttgatgatgatgtgtggatgtgccctgtggagtgttgacaggagtccagttattttatcctctattcacaatcacttctccctctcactctattattctatgttgtcatttcctctttctttggtaaacttttaattttcagttgcagttttttctttttaaaaaaattaattaactgacttatttactttccatcccgatctcagcttcccctcctcctctcttcccagtccttctctctgctttctattaccctacctctttcttttctcctcagtccattttctcttttttcaatcaactttttgttttcttttaaatatttcttagtaactttctctgaggacaaggaagatatgtgagtccctgtttcttcccacagctctaaagagtagtagcagtaattggctttcatgccagagtggaagagaagaatatattttacaataaattctgtctgacatagaagaattctcattataatttttcagtactttaagttggaaacgaaaacaccatttgaaatgagcctgaagtgtctggtatttttgctctgcaattatgttgatggttcttccctcttcccacagctcctgggcaatatgattgtgattgtgttgggccaccacctgggcaaggaattcaccccctgtgcacaggctgccttccagaaggtggtggctggagtggccagtgccctggctcacaagtaccactaaacctcttttcctgctcttgtctttgtgcaatggtcaattgttcccaagagagcatctgtcagttgttgtcaaaatgacaaagacctttgaaaatctgtcctactaataaaaggcatttactttcactgcaatggtgtgttaaattaattgtatctcatagaagggttcatgcttaggtttcaaggtacaaagcagtgagggttcagttctgaccttggggaaataaatgatttgtgcttcatgatatatgctgggacagtaagctataaggcacagctcctaatgctccc

SEQ ID NO: 1325 - DNA, 2040 bp, Rattus norvegicus
aaaattcataaatacaatagttaaggatgttttagagacagagtttgctgcaagggtaagaacacacactactcagagtgaggacctggaactcttatacctaagcctgtaccatagccaccctgagtaggtatggctatcatctctgaagcctcaccctgcagaggcacaccctcacattggtaatctgctcacacaggacagagtgatcagggggcagaatttggcatataaaacagaacagaaccagttgcttcttatatttgcttctgatactgttgtgttgactcgcaacctcaggaacagacaccatggtgcacctaactgatgctgagaaggctactgttaatggcctgtggggaaaggtgaaccctgttgaaattggcgctgagtcccttgccaggttggtatccaggttacaaggtagctcctaagtagaagtttggtgcttggagacagagatctgctttccagcaggtactaacttttattgtctcctggctatgtttccctttgtagtctgctgattgtctacccttggacccagaggtacttttctaaatttggggacctgtcctctgtctctgctatcatgggtaacccccaggtgaaggcccatggcgaaaaggtgataaacgccttcgatgatggcctgaaacacttggacaacctcaagggcacctttgccagcctcagtgaactccactgtgacaagctgcatgtggatcctgagaacttcagggtgagtctgatgggctccccctgggtgtccttcctatgctttcctgctcaccttcctatcagaaggaaagaggaagccactctagggagcattttttgatgaaggtgtgtgggtgtgccctgtggagtgttgacaggagtccagttattttatcctctactcacaatcacttctcccgctcactctgttctatgttatcatttcgtctttcttgagtaaacttttaatttttagttgcagtttttttcttttttaaaaaaattaattaactgacttatttactttccatcccgatctcagcttcccctcctcctctcttacctcctctttctattaccctacctctttcttttctcctcattccatttttgtcttttttaatctactttttgttttcttttaagtatttcctagtaacttgctctgaggacaaggaagacatgtgagtccctgtttcttcccacagctctaaagaatagtagcagctattggctttcatggcagggtggaagggctgcattattttacatataaattctgtttgacatagcagaattcttgttataatttttcagtactttaagttggaaacaaaaacgccatttgaaatgagcctgaagtgtctggtatttttgctctgcaattatgttgatggttcttccctcttcccacagctcctgggcaatatgattgtgattatgatgggccaccacctgggcaaggaattcaccccgagtgcacaggctgccttccagaaggtggtggctggagtggccagtgccctggctcacaagtaccactaaacctcttttcctgctcttgtctttgtgcaatggtcaattgttcccaagagagcttctgtcagttgttgtcaaaatgacaaagacctttgaaaatctgtcctactaattaaaggcatttactttcactgcaatgaaatatagtgttaaatgtgttaaattaattgtgtctcacagaagggttcatgctaaggtttcaagatacaaagcagtgagggttcagttctgaccttggggaaataaatgatttgtgcttcatgatatatgctgggacagtaagctataaggcacagctcctaatcctcccctctgaacacctaagagaaaattcaagacatggtttcatttacacactagattttggttacattttatgttaattacttgttttctctagttttcctcataaatgtgtcctgtcttttctcttacctacccagcacctcacagatttgtagtcaataattattctttcctaaaattaccactattctctaa

SEQ ID NO: 1326 - DNA, 567 bp, Rattus norvegicus
catactgctgccatgaatgcctggttgctgtctgtgctgtgcctcctgggtgccttggctgtcctggtagaaggggtcactgtgcaggatggagacctttcctttcctctggagtcagtgaaacaacttaagcacctccgggaagtacaggagcccacactgatgagtcacaagaagtttgctctcaggcttccgaagcctgtggcaccagagctatgtagccaatctgcatttccagaagcactgaggcccctctgcgagaaacccaacgccgaggagatcctgcagaggctagaggccattgctcaggacccaaacacatgtgaaatctgtgcctatgctgcctgcacgggatgctagagtgacatcacttgccttcctctcagcccacgtggaagccccttctactttctagaagcagcaaggctaacaaactcatacccccagcttctcagcctaccctggacactgtggggaggaggatgaggagacaactaccccggggaagccttgcctaggggctatgctaaccctctgtcaataaatggagctactgtaaaaaaaaaa

SEQ ID NO: 1327 - DNA, 1662 bp, Rattus norvegicus
ggccccgctcctcgccctgcctaccgccggcatctaaacacaggtgggagtgggagatcccgacaggtgagccccgcgccccgcagccacaaggatggagttcgtgaagtgtctaggccacccggaggagttctacaacctgctgcgattccgcatgggaggccggcggaatttcatacccaagatggaccggaactcgctcagcaacagcttgaagacttgctataagtatcttgatcagaccagtcgcagcttcgccgcggttatccaggcgctggatggggacatacgtcatgcggtgtgtgtgttttacctgatcctccgagccatggacacagtggaggatgacatggccatcagtgtggagaagaagatcccactgctgcgaaactttcacactttcctctatgagccggagtggcggttcaccgagagcaaggagaagcaccgagtagtgctggaggacttccccacgatctccctggagtttagaaatttggctgagaaatatcaaacagtgatcgctgacatctgtcacaggatgggatgtgggatggcagaatttctaaacaaggatgtaacctccaaacaggactgggacaagtactgtcactatgttgctggactggtgggaatcggcctttctcgcctattctctgcctcagagtttgaagatcccatagttggtgaagacacagagtgtgccaattctatgggtctgtttctgcagaaaacaaatatcattcgtgattatctggaagaccaacaagaaggaagacagttttggcctcaagaggtatggggcaaatatgttaagaagctggaagactttgttaagccagagaacgtagatgtggccgtgaagtgcttgaatgaactcataaccaacgccctacaacacatccctgacgtcatcacctacctgtcaaggctccggaaccaaagtgtgtttaacttctgtgccattccacaggtaatggccattgctacgctggctgcctgttacaataaccatcaggtattcaagggagtagtgaagattcggaaggggcaagcagttaccctcatgatggatgccaccaacatgccagctgtcaaagctatcatataccagtacatagaagagatttatcaccgggtccccaactcagacccgtcagctagcaaggccaagcagctcatctccaacatcaggacgcagagccttcccaattgccagctcatctcccgaagccactactcccccatttacctgtccttcatcatgctcttggctgccctgagctggcagtacttgagcactctgtcccaggtcacagaagactatgtccagagagaacactgactttgtttagctggaagcggaagtccacgtgaagtgggtttttcttcttcccccagctggattttgacttcccttggtttttccttctactctaatctttcggagaactgagtgtgggacctttaggaactctgaagaggaaaggacgccttgccctcagcagcctggtgcttcctggatgtggtccctgcctcttgtagccactggcatcatgttgaccgaagcactggaaaggccacatgtgatcctagtgaacctggctagaatgctgattgaatctatttaatttgaaacagcctttgaatacctatcacagt

SEQ ID NO: 1328 - DNA, 2028 bp, Rattus norvegicus
ggcagcgaacacaagcgcatccggtagaacggaaagaacaggaattgcagagtgacttcaagtctccatacgatttactacccgggtgacggcagtgactcgacagagtagcggctgcaggtgggatggataacagggtctcgggaacgaccagtaatggagagacaaagccagtgtgtccagtcatggagaaggtggaggaagacggtaccttggaacgggagcaatggaccaacaagatggagttcgtactgtcagtggcgggagagatcattggcttaggcaacgtctggaggtttccctatctctgctacaagaacgggggaggtgccttctttattccctacctcatcttcctatttacctgtggcattcctgtcttcttcctggagacagcgcttggccagtacaccaaccagggaggcatcacagcctggaggaaaatctgtcccatcttcgagggcatcggctatgcctcacagatgatcgtcagccttctcaatgtctactacatcgttgtcctggcctgggccctcttctacctcttcagcagcttcaccactgacctcccctggggtagctgcagccacgagtggaatacagaaaactgtgtggagttccagaaaaccaacaattccctgaatgtgacttctgagaatgccacatcccctgtcatcgagttctgggagaggcgagtcctgaagatctcagatggcatccagcacctggggtccctgcgctgggagctggtcctgtgcctcctgcttgcctggatcatctgctatttctgcatctggaaaggggtcaagtccacaggcaaggtggtgtacttcacagctactttcccttacctcatgctggtggtcctgttgatccgaggagtaacactgcctggagcagcccagggaattcagttttacctgtaccccaacatcacacgtctgtgggatccccaggtgtggatggatgcgggcacccagatcttcttctcctttgccatctgcctggggtgcctcacggccctgggcagctacaacaagtaccacaacaactgctacagggactgcgtcgccctttgcattctcaacagcagcaccagcttcgtggccgggtttgccatcttctccatcctgggcttcatgtctcaggagcagggcgtacccatatctgaggttgctgaatcaggccctggcctggcattcatcgcctaccctcgagctgtggtgatgttacctttctcgcctttgtgggcctgctgtttcttcttcatggtggttctcctgggactagacagccagtttgtgtgtgtagaaagcctcgtgacagcgctggtggacatgtatccccgggtgttccgtaagaagaaccggagggagattctcatcctcatcgtgtctgtcgtctctttcttcatcgggctcattatgctcacagagggcggcatgtacgtgttccagctcttcgactactatgcggccagtggcatgtgtcttctctttgtggccatctttgagtccctctgtgtggcttgggtttacggagccagccgcttctatgacaacattgaagatatgattgggtacaagccgtggcctcttatcaaatactgttggctctttttcacgccagctgtgtgcctggcaaccttcctgttctccctgatcaaatacacgccactgacctacaacaagaagtacacatatccatggtggggggatgccctggggtggctcctagctctgtcctccatggtctgcattcctgcctggagcatctacaagctcaggactctcaagggcccactcagagagagacttcgccagctcgtgtgcccggctgaagaccttccccagaagagccaaccagagctgacttctccagcgacaccgatgacgtccctcctcaggctcacagaactggagtctaactgctagggacgaggcctttgacacacctgcgagtctgtctgtggggacagctacagacacagagggcagaaccacccctccgtgctggggcagagagaca

SEQ ID NO: 1329 - DNA, 3047 bp, Rattus norvegicus
  misc_feature (1)..(3047): n = a or c or g or t
gtcgacctgcaggtcaacggatcctcaacctgaggcaaccaacagcgctgtgtcgggagccacactgacccagggctttcttagaggtaaatgtaacttttatttgcttgagttaattgtctggaagcttctagcctccgtctgtctgtctgtataatcttatctcagcctagaatgtcttcagcctctgagacttcctgttgaataagctttcgcccttnctagttctttctgatctctggctgnctggttcaactcagctgtttctgctcaaactcctctccagactgactgatccattctggcttctcccagttttctcctgaattgctgtacttggcttcacactaacacgaactctagcaatctgttctaaactattctggttccttctcattctctgactctgatatctctctctctctctctctctctctctctctctctctctctctctctctctctctctctctctctctctcactgtcccagtaaaactatcttcttaactttgttttttctcagcccagctctctcttaagtagcttccctttcttctttcttcttctgacagttagtcatatcctgtgctgtcaactctttctctgattcaccacattgtctgtcactcaattagacgtcactttcaaatccgggtgcttccttctacaaactaactttaccttcattatttgggattaaaggtgggtgctaagcactgagccacaccacaactagaaacaggtatcattgtctagaacagacttggcaaggccaaaccgatgctggaactgctgcttctgaggagtcaccggtgcaaaccccactcttcctcttgggctgtggttattagtcccaatgctgctatgtcgggggtgtccagggttctctttaccgagactgtctgacttagctctctgctcaccttgaccacttcccccttcaaaccacaagtaagattctgtacttcagagagccctgagagccccaccgccgccgccagcctggtcatcgtcacaccccaaggagccgcagccattgctgccggccccagtcactatcaccgcaaccatgagaaacccagcagccgccctcagcccccccccccccgccctcagcgctgccaacaccaagcctggctccacaggcagcaacgcgggtagtggcggccagggcggcctcacatggtcagcgcccgccggcggggacaagaaggtcatcgcaaggaaggttttgggaacaataaatggttcaacgaaaggaacggtttcatcaacaggaatgacaccaaggaagacgtatttgtacaccagactgccgtaaagaagaagaaccccaggaagaaccttcgcagggtaggagatggagagactggggtttgatgttgttgaaggagaaaagggtgcggaggtagcaagtgttacagaccctggtggagttccagttcaaggcggtaaaggcgcagcagaccgtaaccattatagacgctatccaggcaattaccagcacaattacaagaatagtgagagtggggaaaagaacgaggaaggccaggcccaacaacgccagccctatcgcaggtgagggttcccaccttacaacatacagagaccctatgtgcgcatggaccacagtattccaacacccctgtgcaaggagaagtgatagagggtgctgaccaccagggtacaggagaacaaggtagaccagtgagacagaatatgtatcggggttacagaccatggttccgcaggggccctcaaggtagaccagtaagacagaatatgtatcggggttacataccacggttccgcaggggccctcaaggtagaccagtaagacagaatatgtattggggttacagaccatggttccgcaggggccctcctcgccaaagacagcctagagaggatggcaatgaagaggacaaggaaaatcaaggagatgagacccaaggtcagcagccacctcaacgttggtatcgttgcaacttcaattaccgaggcagacacccagagaaccctaaaccacaagatggcaaagagacaaaggcagccgatccaccagtgagaattcgtctgctcccgggactgagcagagtcgggctgagtaaaagccggcttaccatctccaccatcatccggtttggtcatccaacaagactaaatgaatatgaaattccagcagtaagaaatgaacaaagatcagaactgaagaccttaagagcttgctctgtgcccgttgggcagatccactagagctgtctgcagtatctatgagcatggggtcttcttatttttacctaaagatgtctctttttggtaatgacaaatgtggttttttttttcttttttcttttttcttttttttttttcggagctggggaccgaacccagggccttgcgcttgctagactacagagcggaagagacctccaatactgctcacccctgcccacatcctggcccaataggaaattgtatacggcctctgggaactggaagataggggcactggagctgcaggtcccctgcaccccagacaccgccagaacctgaagggaccagatgaacagttctctgcggggttggggatttagcccagtggtagagcgcttgcctagcaagcgcaaggccctgggttcggtcctcagctcaaaaacaaaacaaaacaaaacaaacaaacaaaaaaaaaaaaccaaaaccagttctctgcacccaaatcccatgggagggagagctaaaccttcagagaggcagacacacctgggaagccagaagagactacactctgcctacatttctgactacagaggaaaacaccaaacgccatctgggaccctggtgcacggggggccctccagaaaaggcggcacaggtcctcctggttgctgccctcatggagagtgcataagcaacaccccacgaacaaacttgagcctcgggaccacaggtaagaccaacttttctgctccaagtgacctgcctggtgaactcaggacacaggctcacaggaacagctgatgacctgtagagaggaaaaactac

SEQ ID NO: 1330 - DNA, 2563 bp, Rattus norvegicus
cggaacagtctaagggtgttcactttggggactcagtgagtccccctctgttatggagtacagtgtctcttgaatcttacttctggaaatccacggacaagaagactggtgacctatcgattttgtgatgcccacccctggctcctggttccctctctagaggcagaagagccaggcgcagctaatgggacgctttcggagatgctgcgtctgacaggtgcgaagcaacatgtgcaactcctttcttcttcctcccctcagatcctcctccatcttcacccatctttagaggaagagcctacagaaagaagatggctcctgagcaaagagaaggggcctctcaggtgtcagtgacatttgaagatgtggctgtgctctttactcgggacgagtggaagaagctggatctgtctcagagaagcctgtaccgtgaggtgatgctggagaattacagcaacctggcctccatggcaggattcctgtttaccaaaccaaaggtgatctccctgttgcagcaaggagaggatccctggcaggtggagaaagagggccccagatacttctctctcggattgaagtgcagtcatagaaccactaagtcaactcaaacacaagactcttcatttcaggaactgattgtaagaaaatctaaaagaacctttgccttcgaacctttgaacatgaagtcagaaaatcttttcatacatgaaggcaaattagaggaaaagtgggataagaatactttgactgtagaaagaagccataaaaacaatgaatttagcccaaagtcccatagagaaaaacggtcctcagaatgtaaaaagcagatatcttatttatctaacccaccaggaatcacaccggataaacgctataaatgtagcatgtgtgagaaaaccttcattaacacctcatctcttcgcaaacatgagaaaaaccatagtggagagaaattatttaaatgtaaagaatgttcaaaagccttcagccaaagttcagcccttattcaacatcaaataactcacactggagagaagccttacgtatgtaaagaatgtgggaaggccttcactctcagtacgtccctgtataaacatctcagaacccacactgtggagaaatcctacagatgtaaggaatgtggtaaatcctttggccaaaggtcaggtctttttatacaccagaagatccatgcccgagaaaaccctcatagatataacccaggaaggaaggcatccgcttccctctctggatgccagagagctcattccaggaagaagacctacttgtgtaatgaatgtggcaacaccttcaagtctagctcctccctccgttaccatcagagaatccacaccggagagaaacctttcagatgtagcgaatgcggcagagccttcagtcagagcgcatcacttattcagcacgaaagaatccacacgggagaaaagccctacaggtgtggcgagtgtgggaaaggcttcacttctatctcaagactcaatagacaccggataattcatacaggagagaaattgtataattgcaatgagtgtggcaaagccttaagttcccactcaactcttattattcacgaacgaatccacactggagagaaaccgtgtaaatgtaaagtttgtgggaaagccttcagacagagttcagctctgatccaacatcagagaatgcacactggggaaagaccctataaatgtaatgagtgcgggaaaacattcaggtgtaactcatccctaagtaaccaccagcgaatccacactggagagaaaccttatcaatgtatagaatgtgggatgtcgtttggacaaagttctgctcttattcagcaccgaaggattcacacgggagagaaaccgtttaaatgtaacacatgcggaaagacctttaggcagagctcctcacgtatagcacatcagcgaattcatactggggagaaaccctacgaatgtaacacgtgtgggaaacttttcaactataggtcatcccttaccaatcattataaaatccatgtggatgaggacccttaaaaagtaaatttgcatgtaaaaaagccttaaaccaaagctcttcagagaatgggcttgagagctgtaataaacatactatggcgtccctgtagtcatttagttactgtcaactaaattccatggataaatcctgtgtaacaggtaggagtgaaatattcatgcctgtccaacactttaaaaaaattgcttgaaatccggtggttatgtgtagtcctggctaccggggaccctgaggattgcttgactccacaagtttgaagagcaaatgttatggagctttccatctcagaagattagtgacctgaaatgaagaattcacagctgaaggccttgacttcaggtatttggaaaatggtgcttttctctctgcaacagtgtgtgctagatacaattgtaatcataggcatctaagtgaacagaggagtgggatggacttagcaaaacacaaaactctactgttgtgatacttttatactattttaataatatccaaaagggatcaacacaaatcaaaaaaaaaa

SEQ ID NO: 1331 - DNA, 1875 bp, Rattus norvegicus
gaattcgcggccgccgccgggccccagatcccagtgcgcgaggagcccagtcctagacccagcaacctgaggagaggtgcacacacccccaaggacccaggcacccaacctctgccagatgtgggggggtggctacccagaggcatgctcctcacccagctccactgtccctacctgctgctgctgctggtggtgctgtcatgtctgccaaaggcaccctctgcccaggtaatggactttttgtttgagaagtggaagctctatagtgaccagtgccaccacaacctaagcctgctgcccccacctactgagctggtctgcaacagaactttcgacaagtactcctgctggcctgacacccctcccaacaccactgccaacatttcctgcccctggtacctaccttggtaccacaaagtgcagcaccgcctagtgttcaagaggtgtgggcctgatgggcagtgggttcgagggccacgggggcagtcatggcgcgacgcctcccaatgtcagatggatgatgacgagatcgaggtccagaagggggtagccaagatgtatagcagctaccaggtgatgtacactgtgggctacagtctgtccctgggggccttgctcctggcgctggtcatcctgctgggcctcaggaagctgcactgcacccggaactacatccacgggaacctgttcgcgtccttcgtgctcaaggctggctctgtgctggtcattgattggctgctcaagacacgctatagccagaagattggagatgacctcagtgtgagcgtctggctcagtgatggggcggtggctggctgcagagtggccacagtgatcatgcagtacggcatcatagccaactactgctggttgctggtggagggtgtgtacctgtacagcctgctgagcatcaccaccttctcggagaagagcttcttctccctctatctgtgcatcggctggggatctcccctgctgtttgtcatcccctgggtggtggtcaagtgtctgtttgagaatgtccagtgctggaccagcaatgacaatatgggattctggtggatcctgcgtatccctgtactcctggccatactgatcaattttttcatctttgtccgcatcattcatcttcttgtggccaagctgcgtgcccatcagatgcactatgctgattacaagttccggctagccaggtccacgctgaccctcattcctctgctgggagtccacgaagtggtctttgcctttgtgactgatgagcatgcccagggcaccctgcgctccaccaagctcttttttgacctgttcttcagctcctttcagggtctgctggtggctgttctctactgtttcctcaacaaggaggtgcaggcagagctactgcggcgttggaggcgatggcaagaaggcaaagctcttcaggaggaaaggatggccagcagccatggcagccacatggccccagcagggacttgtcatggtgatccctgtgagaaacttcagcttatgagtgcaggcagcagcagtgggactggctgtgagccctctgcgaagacctcattggccagtagtctcccaaggctggctgacagccccacctgaatctccactggactccagccaagttggattcagaaagggcctcacaagacaacccagaaacagatgcctggccaaggctgaagaggcaaagcagcaagacagcagcttgtactatccacactcccctaacctgtcctggccgggtacaggccacattgatggagtaggggctggatatgatggagtagccatgctatgaactatgggtgttcccatgagtgttgccatgttccatgcacacagatatgaccttcagtaaagagctcccgtagg

SEQ ID NO: 1332 - DNA, 1420 bp, Rattus norvegicus
gtgggacttcagatcctgcaactgcctctggccatggcgggacctgagtggcagtccctggagcagtgcctggaaaagcatctgccgcctgacgatttgagccaggtgaagcgaattctctacggcaagcaaactaggaatcttgatctgcccagaaaagctttagaagctgcctcagaaagaaacttcgaactgaagggatacgccttcggggcagccaaggaacagcagagatgtccccagatcgtgcgcgtggggctcgttcagaacagaatcccgctccccacttccgcccctgtggcagaacaggtctctgccctccacaaacgcatagaggaaatagctgaggtggcagcaatgtgcggagtcaacatcatctgtttccaggaagcctggaatatgcccttcgctttttgtacacgagagaaacttccttggacagaatttgctgagtcagcagaggacgggctcaccaccaggttctgtcagaagctggcaaagaagcacaacatggtggtgatatctccaatcttggagcgtgacagagatcacgggggagttctatggaacacagctgtggtgatctccaactcgggactggtcatgggaaagaccagaaagaatcacatccccagagtgggcgacttcaatgagtccacttactacatggagggaaacctcggccaccccgtgttccagacccagtttggcaggattgccgtgaacatctgctatgggcggcaccaccccctcaactggctcatgtacagcgtcaacggagctgaaatcatcttcaacccttcagccaccattggagaactcagtgagtccatgtggccgatcgaagccagaaacgcagccatcgctaatcactgcttcacctgtgccctcaaccgtgtgggtcaggaacactaccccaatgagtttacttctggagatggaaagaaagctcaccatgacctcggctacttctacggttcgagctacgtggcagctcctgacggtagccggacccccggcctctcacgcaatcaggacgggctgctggtcactgagctcaacctcaacctatgccagcagattaatgatttctggactttcaagatgacgggccgacttgagatgtatgcccgggagcttgccgaagctgtcaaacccaactacagtcccaacattgtgaaggaagacctggttctagcccctagctcgggttaggttcgggggcagtggttaagttctaaacatgtgtgcgagagagttttcaatacccaggcaggaggagggtagactgggcaagcgtgtgtgtgataactgttgataagggatatgagatttttcttctggggatttggaaatgttttggggttcaaaaggtgatccgacagcattgaaacttcaataaacataactggatcgtaaa

SEQ ID NO: 1333 - DNA, 5581 bp, Rattus norvegicus
agtgactgctggtcggaccctgggacagactgagggcctggagggaaaccagcccagtacccacacggatggagtgggcctcaggaaaaccagggaggggcaggcagggacagcctgtgccatgggaacttcgcttgggcctacttctaagtgtgctggctgccacattggcccaagtcccatccttggatgtacctggctgttctcgaggaagctgctatccagccaccggtgacctgttggtgggccgtgcagacagactgacagcctcctccacgtgtggcttgcatagccctcaaccctactgtattgtcagtcacctgcaggatgaaaagaagtgcttcctgtgtgactcccgacgtcccttctctgctcgagacaacccaaatagtcaccggatccagaatgtagtcactagctttgcgccacaacgccggacggcctggtggcagtcggagaacggtgttccgatggtcaccatccaactggacctggaagctgagtttcatttcacccacctcatcatgaccttcaagacatttcgtcctgcggccatgctggtggagcgctctgcagacttcggccgcacgtggcgtgtctaccgatatttttcctacgactgcggggctgacttcccaggaatcccgctggccccgccgcgtcgctgggatgatgtagtgtgtgagtcccgctactcagaaattgagccatctactgaaggcgaggtcatctatcgtgtgctggatcctgctattcctattccagacccctacagctcacggattcagaacctgttgaagatcaccaacctccgtgtgaacctcacccggcttcacacactgggagacaacttgcttgacccacggcgggagatccgggaaaaatattattatgctctctatgaacttgtcatccgcgggaactgcttctgctatggacatgcctcacagtgtgcgcctgcaccaggggcaccggcccatgctgagggcatggtacatggggcctgtatttgcaagcacaatactcgtgggctcaactgtgagcagtgtcaggatttctatcaggaccttccctggcatcctgctgaggatggccatactcacgcctgtcggaagtgtgagtgcaacgggcatagtcatagctgccactttgacatggctgtgtacctggcatctggaaacgtaagtggaggtgtctgcgatggctgtcagcacaacacggctgggcgccactgcgagctctgccggcccttcttctaccgtgacccaaccaaggacatgcgggatccagctgcgtgccgtccttgtgactgtgacccaatgggttctcaagacggtggccgctgtgattcccatgatgaccctgtgctaggtctggtctcaggccagtgtcgctgcaaagaacacgtggttggcactcgctgccagcaatgccgggacggcttctttggacttagtgccagcaaccctcgaggatgtcagcgttgtcagtgtaactcaaggggcacagtgcctgggggcaccccttgtgactccagtagtggaacctgtttctgcaagcgtctggtgactggagacggctgtgaccgctgtctgcctggccactggggcctgagccatgacctgctaggctgccgcccctgtgactgtgatgtgggcggtgccttggatcctcagtgtgatgaagccacgggtcagtgcccgtgccgcccacacatgattgggcggcgctgtgaacaagtacagcctggctacttccggccttttctagaccatctaacctgggaggctgagggtgcccatgggcaggtgcttgaggtggtagaacgtctggtgaccaaccgagagactccgtcctggactggtgtaggctttgtgcgactgcgggaaggtcaggaagtggagttcctggtgacctctttgcctagggccatggactatgacctgctactgcgctgggagccccaggttcctgagcagtgggcagagctggaattggtggtgcagcgcccagggcctgtgtctgcacacagtccgtgtgggcacgtgctgccgagggatgaccgcattcaggggatgcttcacccaaacaccagggttttggtgtttcccagacctgtctgccttgagcctggtctctcctacaagctgaagttgaaattgactggaacagggggacgtgcccatcctgaaaccccatactctggatctggaatactcattgactcgctggtgctgcagccccatgtcttgatgctagagatgtttagtgggggggatgctgctgccctggaacgccgtaccacctttgaacgctaccgctgccatgaggaaggtctgatgcccagcaagacccccctatctgaggcctgcgttcccctcctcatcagtgcgtcctccctggtctacaatggcgccttgccctgccagtgtgaccctcaaggctcactgagttccgaatgcaatcctcatggtggccagtgccggtgcaagcctggagtggttggacgacgctgtgatgcctgtgctactggctactatggctttgggcccgcaggctgtcaagcctgccagtgtagtcccgacggagcactcagtgccctgtgtgaagggactagtggacagtgtctctgccgaaccggtgcctttggtcttcgctgtgaccactgtcaacgtggccagtggggtttccctaactgccggccgtgtgtctgcaacgggcgtgcagatgagtgtgacgcccacacaggcgcttgcctgggctgccgtgattacacagggggcgagcactgtgagaggtgcattgctggttttcatggggacccacggctgccatatgggggccagtgccggccttgtccctgccctgaaggccccgggagccagcgacactttgctacttcatgtcaccgggatggatattcccagcaaattgtgtgccactgtcgagcaggctacacagggcttcggtgtgaggcttgtgcccccgggcactttggggacccatccaagccaggtggcaggtgccaactgtgtgagtgcagtgggaacattgaccccacggatcccggtgcctgtgatccccacacggggcaatgcttgcgctgtttacaccacacggaggggccccactgtggccattgcaagcctggcttccatgggcaagctgcccgacagagctgtcaccgctgtacctgcaaccttctgggcacagatccccagcggtgcccatctacagacctgtgccattgtgacccaagcactgggcagtgcccatgcctcccccatgtccaaggcctcagttgcgaccgttgtgcccccaacttttggaactttaccagtggacgtggctgccagccttgtgcttgtcacccaagccgggccagaggccctacctgcaatgagttcacagggcagtgccactgtcatgctggctttggtgggaggacctgttctgagtgccaagagctccactggggagaccctggactgcagtgccgcgcctgtgactgtgatcccagaggaatagacaaaccccaatgtcatcgttctactggtcactgtagctgccgcccaggcgtgtctggcgtgcgctgcgaccagtgtgctcgtggcttctcgggtgtttttcctgcttgtcacccctgccatgcatgctttggagactgggatcgtgtggtacaggaccttgctgctcgtacgcggcgcctggagcagtgggctcaggaattgcagcaaacgggtgtgctgggtgcctttgagagcagctttttaaacctgcaggggaagctgggaatggtgcaggccatcgtggctgcccgcaacacctcagctgcgtctactgcaaagcttgtagaggccacagagggactgcgtcatgaaattgggaagaccactgaacgcctgactcagttagaagcagagctcacagatgtacaggatgagaacttcaatgccaaccatgcactcagtggtctggagagagacgggctcgcacttaatctcacactgaggcagcttgaccagcatctggatatcctcaaacactcaaatttcttaggtgcctatgacagcatccgacatgcccacagtcagtctacagaagcagagcgccgggccaatgcctccacctttgcaatacccagccctgtgagcaactcagcagatacccggcgtcgggcagaagtgctaatgggtgcccaaagagagaacttcaaccgccagcacttggccaaccagcaggcacttggacggctgtccacacacacccataccctgagcctgacgggagtaaatgagctggtgtgtggggccccaggggacgcaccctgtgctaccagcccttgtgggggtgctggatgtcgggatgaggatgggcaaccccgctgtggtggcctcggttgcagtggagcagcagccacagcagatctagcactgggccgggctcggcacacacaggcagagctgcagagagcgctggtagaaggtggtggcatcctcagccgagtgtctgagactcgtcggcaggcagaggaggcccagcaacgagcacaggcagccctggacaaggctaatgcttctaggggccaagtggagcaggccaatcaggagcttcgagaacttatccagaatgtgaaggacttcctcagccaggagggagctgatcccgacagtattgaaatggtagcaacacgggtgctagacatctccatcccagcctcgcctgagcagatccagcgcctagcaagtgagattgcagaacgtgtccgaagcctggcggatgtggacacaatcctggcacataccatgggggatgtgcgtcgggctgaacagctactgcaagatgcacagcgggcacggagccgggctgagggtgagagacagaaggcagagacagtccaagcggcactggaggaggcccagagggcacagggagctgctcagggcgccatccggggagcagtggttgacacaaaaaacacagagcagaccctgcagcaggtccaggagaggatggcaggtacagagcagtctctgaactctgctagtgagcgggctcggcagttacatgcccttctggaagccctgaaactgaaaagggcaggaaacagcctggcagcatctacagctgaagagacagcaggcagtgcccagagccgtgccagggaggctgagaaacagctacgggaacaagtaggtgaccagtaccaaactgtgagggcgttggctgaacggaaggctgaaggtgttctggccgcacaagccagagcagaacaactgcgggatgaggctcggggtctgttgcaggctgctcaggacaagttgcagcggctacaggaactggagggcacatatgaagagaatgaacgcgaactggaggtcaaagcggctcagctggatgggctggaggccaggatgcgcagtgtgcttcaggcaatcaacctgcaggtccagatctacaacacctgccagtgaccactccctagggtttagccttgtctccaagcacagttccacatgcgtttgtccgcacattaaagagctcttggctagcaagtgctttcaataaaccagtgtgaacc

SEQ ID NO: 1334 - DNA, 3775 bp, Rattus norvegicus; identical to SEQ ID NO: 1111

SEQ ID NO: 1335 - DNA, 2528 bp, Rattus norvegicus
gagcccgcgctccactcctttcgtccttcccggtgactttccctccttgtccctggtccatctcgccagaggtcatagcaggcagagtggtgcagctacagcttgaagcagcagctgcggggttcgctgagccccccgggaggcgatcggagcgcggggagagcaggagtgcggccacgcgcccacctctaggtgcggggctcggagccgcccagcccgcgcgcgccctcctccctcctccctcctccctccgcccccgccgcacctccccctcctcccgctctgcttaggctgctccgcggcgcgcctcgcactcggagagccgcagcggcagcggcgcgtctcgcctttggagacagagccgggccgcggggacaccgagcagtcgccgcgaggacgccagggcgcgcgcagcactcgctttccctcggcctcggccgccactgctgagcagacaccatggcccgcggaaaagccaaggaggaaggcagctggaagaaattcatctggaactcggagaagaaggagtttttgggcaggaccggtggtagttggtttaagatccttctgttctacgtgatattctatggctgcctggccggcatcttcatcgggaccatccaagtgatgctgcttaccatcagtgagctgaaacccacgtaccaggaccgtgtggccccgccaggattgacacagattcctcagatccaaaagactgaaatttccttccgtcctaatgaccccaagagctacgaggcctatgtgctaaacatcatcaggttcctggaaaagtacaaagattcggcccagaaggacgacatgattttcgaggattgtggcagtatgcccagtgaacccaaggagcggggagagttcaatcatgaacgaggagagcgcaaggtgtgcaggttcaagcttgactggctggggaactgctctggtctcaatgatgaatcctacggctacaaagaggggaagccctgtatcattatcaagctcaaccgaatgctgggcttcaaacctaagcctcccaagaatgaatccttggagacttaccctctgacgatgaagtataatccaaacgtcctacctgtccagtgcactggcaagcgcgatgaggataaggataaagttggaaacatagagtactttgggatgggcggattctatggctttcctctgcagtactatccctactacggcaaactcctgcagcccaagtacctgcagcccctgctggccgtgcagttcaccaacctcaccttggacactgaaatccgcattgagtgtaaggcgtatggtgagaacattgggtacagtgagaaagaccgttttcagggacgctttgatgtaaaaattgaagttaagagctgatcacaagcacaaatctttcccactagccatttaataagttaaagaaaaagatacacaaacctactagtcttgaacaaactgtcatacgtatgggacctacacttaatctctatgctttacactagcttctgcatttaataggttagaatgtaaatttaaagtgtagcaatagcaacaaaatatttattctactgtaaatgacaaaagaaaaaaataaaaattgagccttgggacgtgcccatttttactgtaattagactccgtaactgacttgtagtgagcagtgttctggcccctaagtatcgccgccgtctgttttatttagtgtacagtactataggtgcgcactctggtcattttccaagccatgttttatcatatctgttttctactttccgtgagcgaggtttgctgtccaaggtgtaaatactcatgggaataaaactggcatggtactttcccttcctttctcattttcttggctctgagatttcaaaggtaacggcccatcaacaagcatttttaacacactccatagtctttccctgtggtatcaggtctttactattgtttttctttgtttcctggggctggggggtgggctgtcgtgggggaactgccctttaaattctaagtgacgctgcagaaaaacaacggtgatgggttgtgttgtgctccgtgctgagtgctgtctcgccatctctccccttgtcctccagtgtgctccgaagctgtgtctgatctggatctgcccgtcactttggctagtgatggggctagttaatttgcttagtacatttccttttccttctttcctttctctggaggcatcatgtgctggtgctgtgtctttatgaatgttttaaccattttcatggtggaagaattttatatttatgcagttgtacaattttatttttttctgcaagaaaaagtgtaatgtatgaaataaaccaaagtcacttgtttgaaaataaaatctttattttgaactttataaaaagcaatgcagtaccccatagactggtgttaaatgttgtctacagtgctaatccatgttctagcatatgtagtgattgccaggagtacagtgctcttgttggtcttgtgtcagtcaggttaacacaatggacaataaaagaatgaacacattc

SEQ ID NO: 1336 - DNA, 3466 bp, Rattus norvegicus; identical to SEQ ID NO: 1100

SEQ ID NO: 1337 - DNA, 5541 bp, Rattus norvegicus
ctgcaagagcaagatatttgtgcggaatgatcatgggtggggccaagagaaatttaagaaagcttttaattctcgatgtgttgtcctgggtaactagggaagatgctggagagaccaggattgcacttttctgtgacaggggatggaaatcagatcgcagaatttgtctcaggatgctccatggacaggaaatggtgatgctagagtcctggtgagaagtctccactcagcactggaggctcaggcctttcttcatcctcgggcctggagacagcgatcagtcttggttagatcaatgatattgtccctagtgattccatgcgcctcacatagttttgcaaacttttccttgatgtctgaactcagatcctttgttctgccgtagagcaccatcagctggaaggtttccccgttcttgaaattaatgagatgaaacatgacatatctgtcatagtctgtcttaagtatagtaaatgtattccctccgtcatactcaacaaaatattcggaattccgactggcttgttttattgaggggggacatgggtaagaacaagtaagacagttgagacccaagtgttaacacaaagggaagactggcgcatcctgctcagcgcatttcggcaacagataatatggcccgtgtgctggcccagcccatgctctgacctccaggcgccaggtcccctacctcagtcactcctacccagaccagctgcggacatgcttagcagatccgggtcccagggaaggcgctgcctggccacactctctcaaattgcctatcagaggaatgatgatgacgaagaagaggctgccagggaacggcgccgccgagcccgacaggaaaggctgcggcagaagcaagaggaagaatccttgggacaggtgacagaccaagtggaggcccatgtccagaacagtgcccccgatgaagagtctaagccagccactgcaaatgctcaggtagaaggtgatgaggaggctgctttgctggagcgcctggccaggcgagaagagagacgtcaaaaacgccttcaggaagccttagagcgtcagaaggagtttgatccaaccataaccgatggcagtctctcagtcccaagcagaaggatgcaaaataactcggctgaaaatgagacagcagagggggaagaaaaaggagagagtcgctcaggacggtatgagatggaagaaacagaagtggtcatcacgtcctaccagaagaacagctatcaggatgctgaagacaaaaagaaagaagaaaaggaggaggaggaggaggaagagaagctgaagggagggaaccttggcgaaaatcagatcaaagatgagaagattaaaaaggacaaagagcccaaagaagaagtcaagaacttcttggatcgaaagaaaggatttacagaagtgaaggcgcagaatggagaattcatgacccacaaacttaaacaaactgagaatgctttcagccccagccgttcaggaggccgggccagcggggacaaggaagctgaaggcgccccacaagtggaagccggtaagaggctggaggagctgcgccgacgccgtggggagacagagagcgaagagttcgaaaaactcaaacaaaagcaacaggaggcagccttggagctggaagagctgaagaaaaagagggaagagagaaggaaggttctggaggaagaggagcagagaaggaagcaggaggaggctgatcgaaaagctagagaggaggaagagaagaggaggttgaaggaagagatcgaaaggagaagggcagaagctgctgagaaacgccagaagatgccggaagatggcctatctgaggacaagaagccgttcaagtgcttcactcctaaaggctcatctctcaagatagaggagcgagcagagtttttgaataagtctgtgcagaaaagtggtgtcaaatcaactcatcaagcagctgtggtctccaagattgacagccggctggagcaatataccaatgcaatcgagggaacaaaagcttcaaaacctatgaagcctgcagcatccgatcttcctgtccctgcggaaggtgtccgcaatatcaagagcatgtgggagaaagggagtgtgttttcatccccctctgcctcggggacaccaaataaggaaactgctggcctgaaggtgggggtttccagccgcatcaatgaatggctaactaaatcgccggacggcaacaagtcacccgctcccaagccttctgacttaaggccaggagatgtatctggcaagcggaacctctgggaaaagcaatccgtggataaggtcacttctcccactaaggtctgaaacaatcggagaaagaacccaactgcaagccatcttgctgggccagctcagttggagagggctaatcgctctgtttatatttatgttttccaatatcccagtaaattcatgtatatgctcactatatttaataaccacaagtagaggtgttcatggtcaaagtgctgcctttgcagaggagcctgtttctaaagaaacccatgctgtgaagtaagcttgctactgtcatatgaacagtgataccaaccacatcagaagtcgacaaaagaaaatcgagcttaagattgtccaaggaatgtatgcggtatctaggtggggggaaatgacccataggctttgttttgtctcagtacagacatcatgtttctgcactttagactaaagcatggaagaaattatctaagtaggcaatcaaaattctctgaaagtgatccacttcagatctgatatagggcagtgatgattgtctttttttttaaaaaagaagatgtactgttgacatattgcttttcttctatgctgattcatacctagattgggtgattattttagctgacagtggtactgatttttttcttcaggttagttgctttgtggatttctctggtagcgatagtagactgaaccacatttagatataacccaactatgtaatgtatgtgcatacgtgtatacagacacactaatggtagatgactctttcatgctggcgctattctatttcatagtacgcccttgtaactaaccaatatcacagctttcaaagattaaagaaaatcacaatagtatatcaatatttcatatttgccagtagaaacatggaagttaggtatagatatgttttcaatgcccaatgacttataagaaaaaagtattggaaaaataagagattacaagtgtcaaaactagttgaaacttcttataagacatagtatttagtttataattgagagcagtcttgaattccagtgtgaattttattaagtctaccatctggacaaagcccaaaccctgtttatttgtggccgtgaagttcacctcctccacacacaaaaaaagttgacctacatgatacctaaggtgtctcctttctctacgaattccggaattccggaattccccaactgcactgtctccacacagctttccttcccactggttacaagcaaattggacaacaaaatctcatgagatatttgtgatttaattttagtcacaaaacatcttcaaaatgacgaggattttgacagcatgcaaagtggtgaagacactgaagagtggctttggtttggccaatgtgacttcgaagcgacagtgggacttctctagacctggcatcaggctcctttctgtgaaggcacagacagcacacattgttctggaagatggaactaagatgaagggctactcctttggccatccctcctcggttgctggcgaagtggtttttaatactggcttaggagggtactcggaagcacttactgatcctgcctacaaggggcagatcctcaccatggccaaccctatcattgggaatggtggggcccctgatacaacggcacgtgatgaactgggactgaataagtacatggagtctgatggaatcaaggtggcgggtctgctggtgctgaattacagtcatgactacaaccactggctggccaccaagagtctgggcagtggctgcaggaggagaaggtccctgcaatttatggagtgggtacaagaatgctgactaaaataattcgggataagggtaccatgcttgggaagattgagtttgaggccagtctgtggactttgtggatcctaataagcagaatttgattgccgaggtttcaaccaaggatgtcaaggtgtttggcaaaggaaaccccacgaaagtggtagccgtggactgtgggataaaaaacaatgtcatccgcctgctagttaagcgaggagcggaagtgcatttggtcccctggaatcatgacttcacccagatggactatgacggacttctgatcgctggaggacctgggaacccagctctgcacagccactaattcagaacgtgaagaagattttggagagtgaccgcaaagagccgttgtttggaatcagtacaggaaacataataacaggattggctcgtggcgccaaatcctacaagatgtccatggccaacagaggacagaaccaacctgttttgaatatcacaaacagacaggctttcataactgctcagaatcatggctatgctctggacaacaccctccctgctggctggaaaccactgtttgtcaatgtcaatgaccaaacaaatgaggtacacgctctcaacaatccattcaggtggaagtaagaagttatggcttttcatagtctgttttatacttctttcccatgtctatgtggtgtgcatgtgcatatgtgccacacactcgtgtgtgtgcatgtgcatgtctattgtgtaggtgtgtgcacccatgtgtgtccatggggagcccggagcaggacacccggtttcttcctggattgttcttcacttaattgtcgtatacatggccactcgttgaactgaacctttggcttggctggctggtcaataaataagctctcaggaagcgttcagctccattccttaaccctgaggttatagcacatgcactgaccagctccattccttaacgctgaggttataaacgcatgcactgaccagctccattccttaacgctgaggttataaacgcatgcactgaccagctccattccttaaccctgaggttatagcgcatgcactgaccacgtccattccttaacgctgaggttataaacgcatgcactgaccagctccattccttaaccctgaggttatagcgaatgcactgaccagctccattccttaacgctgaggttatagcgcatgcactgaccagctccattccttaaccctgaggttatagcgcatgcactgaccagctccattccttaaccctgaggttatagcgcatgcactgaccagctccattccttaacgctgaggttataaacgcatgcactggcatgcttagcttctcacacaggtgataggaacttggcctcagatccttgcctgtaggtcaagtgctctaagccatggaacgatctccccagacagcctgtcactttaaaaaagtaattgctctcttcctttctaattagtcgacttgttaagggccagcacttgcacctccg

SEQ ID NO: 1338 - DNA, 4557 bp, Rattus norvegicus
cttctacttcagacactgtgcgctctcccggaccgtcgtgcgccgctccccgtcgccttccaggactgggaaaggggagaggaggacggtgccacgtccgacggcctcctgggctgggggcagggtctgccgctcgcccttggcaccagtccctgcgacccatccccgagcctcgccctcctcctccctgctcgaagaggtctccctccttcgcgggatctgagtccctgtcttcatttttctcctagccacgtccctccccgagaagggacgagccgggagcatcatgcgtttcgcctggaccgtgctctttctgggacagctgcagttctgtccccttctccgctgcgccccgcaggccccgcgcgagcctcccgccgcccccggtgcctggcgccagacaatccaatgggagaacaacgggcaggtgttcagtctgttgagcctgggggcgcagtaccagcctcagcgacgccgcgactccagcgccactgccccgagagccgacggcaacgctgcagcacagccacgcacgcccattctgctgctgcgtgacaaccgcactgcctctgcccgtgcgaggactccaagcccatctggggtcgccgcgggtcgtccccggcccgcagcccgccactggttccaagttggtttctcgccgtcgggggccggcgatggagcctcaaggcgcgcagcgaaccggactgcgtcgccacagcctccgcagctcagtaatctgaggccacccagccacgtagatcgcatggtgggcgacgacccctacaatccctacaagtactccgacgacaacccctattataactactatgacacttatgagagaccccggtccgggagcaggcaccgacctggatatggcaccggttacttccagtacggtctcccggacctggtacccgatccctactacatccaggcatccacgtacgtacaaaagatgtctatgtacaacctgagatgcgctgcggaagaaaactgcctggccagttcagcatatagggcggatgtcagagactatgaccacagggtactgctacgatttcctcagagagtgaaaaaccaagggacgtctgacttcttaccaagccgcccccgctactcctgggagtggcacagctgccaccaacattaccacagcatggatgaattcagccactacgacctgctggatgccagcacacagaggagagtggccgagggccacaaagcaagcttctgtctggaggacacttcctgtgattatgggtaccacagacgatttgcctgtactgcacacacacaggggttgagtcccggatgttatgatacttatgcagcagacatagactgccagtggattgatattacagatgtacaacccggaaattacattctaaaggtcagtgtaaaccccagctacctggtgcctgaatcagactacagtaacaatgtcgtacgctgtgaaattcgctacacaggacatcacgcctatgcctcaggctgcaccatttcaccgtattagaaagaagctcaccttcccaaaggatgaagcagtacctggtgtttggacctatgaaaaccgtagattagcttaagtaggaagacttagatattttaaaaggcaaacggaaaaacaacaaagaaggttttgtttggactctttcacaacaaatcacataactggattttgagtgtttaaatcagcattagattggcacattttaaatacttattcatgttgctttatgaagtaatggtgtttcaattctgtgggtgcatagtgggctctttcaaagaattctgaatttcttaccttcttttgaaattatagtgcaaaaagaagaggatattttaatgaatgagccacaatttgaactgattactttctaaattgccagacccatgagacaatgatgatgggtttgtatttgcctcaacatagattcgctttttaaaaagggtgttcctattgtataggcaaaaatggatacacttggtgctgaggaagggtcaaatactaactattgttgtcacgaaatataggtctacagcagagagatggtgagtatatattcagatagttacatccctatataaactatgtttacattttagatgcttttctttctgttaattgcttaatctcactctgacttgaggtacaacttctgttttggaatgaattagataattccagattctggtttgataattgttgacattcccccatgctactttttctgagggcagaaacgtctaatgtgacgactcttcacattaccattacgaggatacacagcacagcgaaatcattccgatgacaggtgtgatagatggagagctaacatgcaactgccgagtgtttcactgttagccagaactaagtcactgcccacacagcaattacaccatgaatctctaacatcacaaccttctttcaaatactgtaaaaaaaaaaatactggaaaacctttttagatttgtttcaatctaccacgcttctgaaatgttcagctattaaggggaatgtcaatatatatatacagcccaaattagcgaagcccaaattagggaagcacatagcatggcatacttgagaggttggcaaacaagagggaagcaggtactttctgcaaaaacagggactgtgcgccacaatgagaccgctgtgaccttacttcaaactgtgaaactgtgtgcagcagtaggatttggagtcttaaattcagaaggagcagaaagaaagagagttagacgtttgaattcctggtgcttatgctgacgttttctctcatttgccagcattaaaatctcaagtaaggtgtctcctgtgccaggacgtgtcaggtagacctttctcagtgagctggaatcctgccttctgtgtcatagagttgtaagagcagcagtttctacccatcatgctgtgtactcactgctgcagagcaagtgggaggggccagagatgggccgtccccaggggcggatagcgcggtacacttaattctcttctgcctgaaagcacacttccccgtaagcgaatacagacagaactttgattgagctggtatctgaccgataggattgcttctttgatgtacctctttgacctagctagcatttcagctttgatactgcagaacgatcttttcaaattataatcattctgatagagatatcttaatagacgtgcttttaaaaacaaaacggaaactactgtcagtatgaatactgagccagactggcattcatagatttaacaacttgtatttctaagattcttaactctataaaagtaatatggcttttagatatataggataataatttcagtgagaccgttatctctttactcaacattatgttagggacagtataagccaagcacttacctgttacacattggagactaaaacgactgcccccaaccttagtaagtatgaaaactagactcacattatttcatttttaactgctaaaagtatgtctatagaatttaaaatttaagcactactatttgtcctggccacatttttcaaaaattaagttaaaagttattaattatatacaggtgtgtatttctaataattaaaatacctttcaaatccatggaatgtctgccttttaaatgtaatttgggcttttttgtttgattctttttcacttaactagctgtttatttgtaaacatttctttccacgatttaaaaacacttccaatcggctttacttcctgatttagcacttcctattttgacccttgggcatctgttcttcgtttaattggtgtagaataatgataaaaatcccaagctagtctaaccaaactgcattcttaagagtactaagtgggaatgatgcaaagttcatcaagaattgaaaagaagccggtctttgcactaaggaagacagcataattaagtcttctcgttgccatctgagtaatatcatgatatggggaccgcagaatccatctccggtgggatgatggtatagctttcctagttccagaaaaaatctccttcacattttatataataatttaatcacaatgtccatcgaattcttccttaggcattctttgtaacagtagtgtgctgctctttaaaatattaacctctgacacatgtgtgaacctcattccctgtggtcactaaaatttcttccccactgagcatcaatctttagcagattttaggaaaatactgaattcttagtcaggaaatattttaggaataatcttgctaacagtatattaagtaataaaattacccactctatgtgtgtttcattttttttaatttacatagacaatggtttttataaagcaatgatttcaatttttcccagctacccaaagtcctggttaatttgtgaacacaaattttgttagccttcaagtttaaacggtgctgaattgtcttaacttgaatgtaaaaatggattaaggcttatctcatgggacacaaacatgtcccatatgactgcttgctgcgtactaggggacatgccatttggtgttaaattgtctataataaagttcggtttctcccaaaaa

SEQ ID NO: 1339 - DNA, 5240 bp, Rattus norvegicus
cctcccctggggaggttcgcgttcccgtggctcgcgcctgctgcccgccggcctcgagaacgcgctctctcggccgcggcgctcacagtctccgccacccaccagctccagcaccagcagcagcgccggcgccaccgcccaccttctgctgtcgccgccgccacaaccaccttcccctccgctgtcctcttctgtcctcgcctcctgtcgattatcaggctttgaagcagcatggctgaaccccgccaggagtttgacacaatggaagaccaggccggagattacactatgctccaagaccaagaaggagacatggaccatggcttaaaagctgaagaagcaggcatcggagacaccccgaacatggaggaccaagctgctgggcatgtgactcaagctcgagtggccggcgtaagcaaagacaggacaggaaatgacgagaagaaagcgaagggggccgatggcaaaacgggggcgaagatcgccacacctcggggagcagccactccgggccagaaaggcacatccaatgccaccaggatcccagccaagaccacacccagcccaaagactcctccaggatcaggtgaaccaccaaaatccggagaacgaagcggctacagcagccccggctcgcccggaacccctggcagtcgctcccgtaccccatccctaccaacgccgcccacccgagagcccaaaaaggtggcagtggttcgcactccccctaagtcaccgtctgccagtaagagccgcctacagactgcccctgtgcccatgccagacctaaagaacgtcaggtccaagattggctccactgagaacctgaagcaccagccgggaggcggcaaggtgcagataattaataagaagctggatcttagcaacgtccagtccaagtgtggctcaaaggacaatatcaaacacgtcccgggcggaggcagtgtgcaaatagtctacaagccagtggacctgagcaaggtgacctccaagtgtggttccttagggaacatccatcacaagccaggaggtggccaggtagaagtaaaatcagagaagctggacttcaaggatagagtccagtcgaagattggctccttggataacatcacccatgtccctggaggagggaataagaagattgaaacccacaagctgaccttcagggagaatgccaaagccaagacagaccatggagcagaaatcgtgcacaagtcacctgtggtgtctggggacacatctccacggcacctcagcaacgtctcctccacgggcagcatcgacatggtggactctccacagcttgccacgttagccgatgaagtgtccgcctctttggccaagcagggtttgtgatcaggcccctggggccgtcactgatcatggagagaagagagagtgagagtgtggaaaaaaaaaaaaaaagaatgacctggcccctcaccctctgccctccccgctgctcctcatagacaggctgaccagcttgtcacctaacctgcttttgtggctcgggtttggctcgggacttcaaaatcagtgatgggaaaaagtaaatttcatctttccaaattgatttgtgggctagtaataaaatatttttaaggaaggaaaaaaaaaacacgtaaaaccatggccaaacaaaacccaacatttccttggcaattgttattgaccccgcccccccctctgagttttagagggtgaaggaggctttggatagaggctgcttctggggattggctgagggactagggcaactaattgcccacagccccatcttaggggcatcagggacagcggcagacatgaaagacttgggacttggtgtgtttgtggagccgtaaggcgtatgttaactttgtgtgggtttgagggaggactgtgatagtgaaggctgagagatgggtgggctgggagtcagaggagagaggtgaggaagacaggttgggagagggggcattgcgtccttgccaaggagcttgggaagcacaggtagccctggctgcagcagtcttagctagcacagatgcctgcctgagaaagcacagtggggtacagtgggtgtgtgtgccccttctgaagggcagcccatgggagaaggggtattgggcagaaggaaggtaggccccagaaggtggcaccttgtagattggttctctgaaggctgaccttgccatcccagggcactgctcccaccctccaggaggaggtctgagctgaggagcttccttttcgatctcacaggaaaacctgtgttactgagttctgaagtttggaactacagccatgattttggccaccatacagacctgggactttagggctaaccagttctttgtaaggacttgtgcctcttgcgggaacatctgcctgttctcaagcctggtcctctggcacttctgcagtggtgagggatgggggtggtattctgggatgtgggtcccaggcctcccatccctcgcacagccactgtatcccctctacctgtcctatcatgcccacgtctgccacgagagccagtcactgccgtccgtacatcacgtctcaccgtcctgagtgcccagcctcccaagcccaatccctggacccctgggtagttatggccaatctgctctacactaggggttggagtccagggaaggcaaagatttgggccttggtctctagtcctacgttgccagaatccaaccagtgtgcctcccacaaggaaccttacaaccttgtttggtttgctccatcaggcgtttggcgccatcgtggatggagtccgtgtgtgcctggagattaccctggacacctctgctttttttttttttactttagcggttgcctcctaggcctgactccttcccatgttgaactggaggcagccaagttaggtgtcaatgtcctggcatcagtatgaacagtcagtagtcccagggcagggccacacttctcccatcttctgcttccaccccagcttgtgattgctagcctcccagagctcagccgccattaagtccccatgcacgtaatcagcccttccataccccaatttggggaacataccccttgattgaaatgttttccctccagtcctatggaagcggtgctgcctgcctgctggagcagccagccatctcagagacgcagccctttctctcctgtccgcaccctgctgcgctgtagtcggattcgtctgtttgtctgggttcaccagagtgactatgatagtgaaaagaaaaagaaaaagaaaaaagaaaaaagaaaaaaaaaaaaggacgcatgttatcttgaaatatttgtcaaaaggttgtagcccaccgcagggattggagggcctgatattccttgtcttcttcgtgacttaggtccaggccggtcgagtgctaccctgctggacatcccatgttttgaagggtttcttcttcatctgggacccctgcagacactggattgtgacattggaggtctatacattggccaaggctgaagcacaggacccgttagaggcagcaggctccgactgtcagggagagcttgtggctggcctgtttctctgagtgaagatggtcctctctaatcacaacttcaagtcccacagcagccctggcagacatctaagaactcctgcatcacaagagaaaaggacactagtaccagcagggagagctgtggccctagaaattccatgactctccactactatccgtgggtcctttccaagccttgcctcgtcaccaagggcttgggatggactgccccactgatgaaagggacatctttggagacccccttggtttccaaggcgtcagccccctgaccttgcatgacctcctacagctgaaggatgaggcctttaaagattaggaacctcaggcccaggtcggccactttgggcttgggtacagttagggacgatgcggtagaaggaggtggccaacctttccatataagagttctgtgtgcccagagctaccctattgtgagctccccactgctgatggactttagctgtccttagaagtgaagagtccaacggaggaaaaggaagtgtggtttgatggtctgtggtcccttcatcatggttacctgttgtggttttctctgtatacccccatttacccatcctgcagttcctgtccttgaataggggtgggggtactctgccatatctcttgtaggcagtcagcccccaagtcatagtttggagtgatctggtcagtgctaataggcagtttacaaggaattctggcttgttacttcagtgaggacaatcccccaaggccctggcacctgtcctgtctttccatggctctccactgcagagccaatgtctttgggtgggctagatagggtgtacaatttgcctggaacctccaagctcttaatccactttatcaatagttccatttaaattgacttcaatataagagtgtatccatttgagattgcttgtgttgtggggtaaaggggggaggaggaacatgttaagataattgacatgggcaaggggaagtcttgaagtgtagcagttaaaccatcttgtagccccattcatgatgttgaccacttgctagagagaagaggtgccataaggctagaacctagaggcttggctgtccaccaacaggcaggcttttgcaaggcagaggcagccagctaggtccctgacttcccagccaggtgcagctctaagaactgctcttgcctgctgccttcttgtggtgtccagagcccacagccaatgcctcctcaaaaccctggcttccttccttctaatccactggcacatcagcatcacctccggattgacttcagatccacagcctacactactagcagtgggtaagaccacttcctttgtccttgtctgttctccagaaaagtgggcatggaggcggtgttaataactataggtctgtggctttatgagccttcaaacttctctctagcttctgaaagggttacttttgggcagtattgcagtctcaccctccgatggctgtagcctgtgcagttgctgtactgggcatgatctccagtgcttgcaagtcccatgatttctttggtgttttgagggtggggggagggacatgaatcatcttagcttagcttcctgtctgtgaatgtccatatagtgtactgtgttttaacaaacgatttacactgactgttgctgtacaagtgaatttggaaataaagttattactctgattaaacaaaaaaaaaaaaaaaaaaaaaaaaaaaaaaaa

SEQ ID NO: 1340 - DNA, 2519 bp, Rattus norvegicus; identical to SEQ ID NO: 1283

SEQ ID NO: 1341 - DNA, 1634 bp, Rattus norvegicus
aagagattgtggtgagtcagaagaccagggaataaaactctagtcctgatctgagggctgaggagagccgcatccagactttctcatctgattttgaacaatttaacagccctcctcaggatcaccatacatcaccactgctccgcctgtgatctgtttcctgggttgaccatgcctggatggagctgcctggtgacaggagcaggagggtttgtgggccagaggatcatccggatgttggtgcaggagaaagaactgcaggaggtcagggctctggacaaagtcttcagaccagaaaccaaggaggaattctctaagctgcagacaaaggccaaggtgacaatgttagaaggagatattctggatgcccagtacctgaggagagcgtgccagggcatctctgttgtcatccacaccgctgctgtcattgatgtctcacatgtcctacccaggcagaccatcctagatgtcaatctgaaaggtacccagaacatattggaggcctgcgtcgaagccagtgtgccagccttcatctactgcagcacagttgacgttgcagggcccaactcctacaagaagatcatcctgaatggccatgaggaagagcatcatgaaagcacatggtcagatgcatacccatacagcaaaaggatggccgagaaggcagtgctggcagccaatgggagcatcctgaaaaatggtggcacactgcatacttgtgccttaaggcccatgtacatttatggggagagaagtccattcctttctgtcatgatacttgcggccctcaaaaataagggtattctgaatgttactggcaaattctccatagccaatccagtgtatgtaggcaatgtggcctgggcacatattctggctgccaggggccttcgagaccccaagaagtcacaaaatgtccaaggacagttctactacatctcagatgacacccctcaccaaagctatgatgatttaaattgcaccctgagcaaggaatggggcctccgccttgattccagctggagccttcctctgcccctgctctactggcttgccttcctgctggaaactgtgagcttcctgctgcgtccattttacaactataggccaccctttaactgccacttggtcacactgtcaaatagcaagttcactttctcctacaagaaagctcagagagatctgggctatgtgccacttgtcagctgggaggaagccaagcagaaaacctcggagtggatcgggacactagtggagcagcacagggagacactggacacaaagtctcagtgacagaaagggggcaaggatgtggttctgggtgttaccaggtcctccagctaggacagaggcacaatccaggtcctgatgccctcttttgacacagactctaactctatgtctttatgacttcactggaagccttgctagtccacaagctttcttccctaatcccctgtccagagacacacaggtagttgtgcctcagctgctgtgaccaaaggcttcagcaatgacaatttcctgtcacttagagctgagtattacttttctgttcctcttcaagtcctaaatcacatcctgctttggttatatctcattgatttataaagcaataaatattgtaatgcctt

SEQ ID NO: 1342 - DNA, 5575 bp, Rattus norvegicus
gtttttttttttttttttcctcccctccctcccccgcgtttcatgcagctgatccgaaagggaataaaaggctgcgcataatcataatataaaagaaggggagcgcgagagaaggaaagaaagccgagaggtggaagaggggggagcgcctcaaagaagcgatcagaataataaaaggaggccgggctctttgccttctggaacgcgcggctcttgaaagggcttttgaaaagtagtgttgttttccagtcgtgcatgctccaatccacggagtatattagagccgggacgcggccgtcgcgggggcagcgacgacggcagtcctcggagggagcaccagcgctagcagcggcggcggcgtccggagtgccccccgcgcggcagcgatgcggtccccacggacgcgcggccggccggggcgccccttgagccttctgctcgccctgctctgtgccctgcgagccaaggtgtgcggggcctcgggtcaatttgagctggagatcctgtccatgcagaacgtgaacggagagttacagaatgggaactgttgcggcggagcccggaaccctggcgaccgcaagtgcacccgcgacgagtgtgacacgtacttcaaagtgtgcctcaaggagtatcagtcccgcgtcacggccgggggaccctgcagcttcggctcagggtctacgcctgtcatcgggggcaataccttcaatctcaaggccagccgcggcaacgaccgtaatcgcatcgtactgcctttcagtttcgcctggccgaggtcctacactttgctggtggaggcatgggattccagtaatgacactattcaacctgatagcataattgaaaaggcttctcactcaggcatgataaaccccagccggcagtggcagacactgaaacagaacacagggattgcccactttgagtatcagatccgagtgacctgtgatgaccactactatggctttggctgcaacaagttctgtcggcccagagatgacttctttggacattatgcctgcgaccagaatggcaacaaaacctgcatggaaggctggatgggtcctgagtgtaacaaagcaatatgccgacagggctgcagtcccaagcatggctcctgcaaactcccaggtgactgcaggtgccagtatggttggcagggcctgtactgtgataagtgcatcccgcacccaggatgtgtccacggcacctgcaatgaaccctggcagtgcctctgtgaaaccaactggggtggacagctctgtgacaaagatctgaattactgtgggactcatcagccctgtctcaaccggggaacatgtagcaacactggccctgacaaataccagtgttcctgccccgagggctactcaggaccgaactgtgaaattgctgagcatgcctgcctctctgatccctgccacaacagaggcagctgcaaggagacctcctcgggctttgagtgtgagtgttctccaggctggactggacccacgtgttccacaaacatcgatgactgttctccaaataactgttcccatggaggcacctgccaggatctagtgaatggattcaagtgcgtgtgcccaccccagtggactggcaagacttgtcagttagatgcaaatgagtgcgaggccaagccttgtgtaaatgccagatcctgtaagaatctgattgccagctactactgtgattgtcttcctggctggatgggtcagaattgtgacataaatatcaatgactgccttggccagtgtcagaatgatgcctcctgtcgggatttggttaatggttatcgctgtatctgtccacctggctatgcgggcgatcactgtgaaagagacatcgatgaatgtgctagcaacccctgcttgaatgggggtcactgtcagaatgaaattaacagattccagtgtctgtgtcccactggtttctctggaaacctctgtcagctggacatcgattactgcgagcccaacccttgccagaatggcgcccaatgctacaatcgtgccagtgactatttctgcaagtgccctgaggactacgagggcaagaactgctcacacctgaaagaccactgccgcaccactccctgtgaagtgattgacagctgcaccgtggccatggcctccaacgatactcctgaaggggtgcggtatatctcttccaacgtctgtggtccccatgggaagtgcaagagcgagtcaggaggcaaattcacctgtgactgtaacaaaggcttcaccggcacctactgccatgaaaatatcaacgactgtgagggcaacccctgtacgaacggtggcacgtgcatcgacggcgttaactcctacaagtgtatctgtagtgacggctgggagggcgcgcactgtgagaacaacataaatgactgtagccagaacccttgccactatgggggtacatgtcgagacctggtcaatgacttttactgtgactgcaaaaatgggtggaaagggaaaacctgccactcgcgtgacagccagtgtgacgaagccacgtgtaataacggtggtacctgctatgatgaagtggatacgtttaagtgcatgtgtcctggtggctgggaaggaacaacctgtaatatagctagaaacagtagctgcctgccgaacccctgtcataatggaggcacctgcgtggtcaatggagactccttcacctgtgtctgcaaagaaggctgggaggggccgatttgtactcaaaataccaacgactgcagtcctcacccttgttacaacagcggaacctgtgtggatggagataactggtaccggtgcgaatgtgcccctggttttgctgggccagactgcaggataaacatcaatgagtgtcagtcttccccttgtgcctttggggccacctgtgtggatgagatcaatggctaccagtgtatctgccctccaggacatagtggtgccaagtgccatgaagtttcagggagatcttgcatcaccatggggagagtgatacttgatggggccaagtgggatgacgactgtaacacctgccagtgcctgaatggacgggtggcctgctccaaggtctggtgtggcccgagaccttgccggctccacaaagggcacggcgagtgtcccaatgggcagagctgcatcccagtcctggatgaccagtgtttcgtgcgcccctgcactggtgctggcgagtgtcggtcctccagcctccagccagtgaagaccaagtgtacatcggactcttattaccaggacaattgtgcgaacatcactttcacctttaacaaggagatgatgtctccaggtctcaccactgagcacatttgcagcgaattgaggaatctgaatattctgaagaatgtttctgctgagtattcaatctacatagcctgtgagccttccttatcagcaaacaatgaaatacacgtggccatttctgccgaagacatccgggatgatggaaaccctgtcaaggaaattactgataaaataatagatctcgttagtaaacgggatgggaacagctcacttatcgctgctgttgcagaagtcagagttcagaggcgccctctgaaaaacagaacagatttcctggttcctctgctgagctctgtcttaacagtggcttgggtctgttgcttggtgacagccttctactggtgtgtgcggaagcggcggcggaagcccagcagccacacccactctgcccctgaggacaacaccaccaacaatgtgcgcgaacagctgaaccaaatcaaaaaccccatcgagaaacacggagccaacacagtccccatcaaggattatgagaacaaaaactccaaaatgtcaaaaatcaggacacacaactcggaagtggaagaggatgatatggataagcaccagcagaaagtccggtttgccaaacagcccgtgtacacgctggtagacagagaggagaaggtcccccagcgcacgccgacaaaacacccgaactggacaaacaaacaggacaacagagacttggaaagtgcccagagcttgaaccggatggagtacatcgtatagcagacagtgcgtgccgccataggtagagtttgagggcaccccggggcttgtagtttctttaaactgttgtcgtatcccagtctgaggctgttgttgacttagagtcctgtgttaatttaagtttcgacaagctggcttccactggcactggtagtttctgtggttggctgggaaatcgagtgcagcgctcacagctatgcaaaaaccagtgaatgtgcccgggtgtacattcccctgcagccgactcgtcggctcccaggagctgcccaggcctaggcctcggagcttccacatctgccagcggtcctaatggtgatggcagccttaggatcatagttttatttatatttattgactcttgagttgtttttgtatattggttttatgatgacgtacaagtagttctgtatttgaaagtgcctttgcagctcagaaccacagcaactatcacaaatgactttattatttattttttttattgtatttttgttgttgggggaggggggatttgatgtcagcagttgctggtaaaatgaagaatttaaagaggaaaaatgtgtcaaagtagaatttttgtatagttatgtaaataattcttttttattaatcactctgtatatttgatttattaacttaataatcaagagccttaaaacatcattcctttttatttatatgtatgtgtttagaattgaaggtttttgatagtgttggaaacatatggctttttttttttttttttgtgaactttttctcattacgtgttgcctgtaagccaaaagtaaggtgtttggaaatagtttctcttggaaggatgggataggcttcttcccctgggaatactgatggattttttttttttttttttttttttgtacgacgtcaggtgttcaaacacttccttgatagcatcactttaagacacattctaaggactgactgaggcagattgagaattcgtctagaacaggtttttgtttttttctcttttctttttttattttttcctgctttagacttgaaaagagacaggcaggcgatctgtgacagagcagtttaagggaacaaactgagctatgtagtcagaatgtgactggttggatctcattaaaagtatcagattgtgtgaagttggaagcttaccaatcttactttgtaaattctgatttcttttcaccattcgtatgtaatgctgaaccacttgtagatttgatttcattgttgttgtctactgcatttagggagtattctaataagctagatgaatacttgaaccataaaatgtccagttagagcactgtttagattggccatagagtacactgcctgccttaagtgaggacatgaaagtgctattaccaagttcaagatcaaaaaaggcttataaaacagtcatcctggctcaccacggagcccaggaagatactttgtattgtcctattagtgttatatgaacataaaatacatctttgatgtgttgttcctggcaataaattttgaaaagtgatatttattaaattttttgtatg

SEQ ID NO: 1343 - DNA, 3115 bp, Rattus norvegicus
gttgaacagcagccagagcctgaagaagccaactccagggcggaggaaaggaagcagaaggctcagcaccagtctccaacacttggcaagatgggtgactggagcttcctgggggagttcctggaggaggtccacaagcactctacggtcatcggcaaggtctggctcaccgtcctgttcattttccgcatgctggtcctcggcaccgctgctgagtcctcctggggagatgagcaggctgatttccggtgtgataccattcagcctggttgccaaaatgtctgctacgaccaagccttccccatctcccacattcgttactgggtactgcagatcatctttgtgtccacaccatctctggtgtacatgggccacgccatgcacactgtgcgcatgcaggaaaagcagaagctgcgggaggctgagaaagctaaagaggccggtggcaccggcacctatgagtacttggcggagaaagccgagctgtcctgctggaaagaggtgaacgggaagattgtcctccagggcaccctactcaacacctatgtctgcaccattctcatccgcaccgctatggaggtggccttcatggtgggccagtacctcctctatgggatcttcctggacaccctgcatgtctgccgcagaagtccctgtccccaccccgtcaactgttatgtctcgaggcccacagagaagaacgtcttcattgtctttatgatggctgtggctggactgtctctgtttctcagcctggctgaactctaccacctgggctggaagaagatccgacagcgcctggccaagtcacggcagggtgacaagcaccagcttcttggcccctccaccagcctggtccagggcctcactcctcctcctgacttcaaccagtgcctaaagaacagcccagatgagaaattcttcagtgacttcagtaataacatgggctcccggaagaatccagaccctctggccactgaggaagtgccaaaccaggagcagatcccggaggaaggtttcatccacacacagtatggccagaagcccgagcagcccagtggcgcctctgcaggccaccgctttcctcagggctaccacagtgacaagcgccgccttagtaaggccagcagcaaagcaaggtcagatgacctgtcagtgtgaccctcctcttagggaggaccagtcccagaaggaagccaaggagggtgaggcaggacagaagcggtctctctgactgtataccttcctcagcaccttctctcccgggtctggatggtgttgctcattaatcctccaaatttcagttctgagccgtattctcaaagattgggctactcctcaaatccccaaccccacatcctctaccagtattcgcagtgaagactttcaagtgatttagtgatatggtgggagcaggaatgggaaccttggcaaaatctggtctgggtaggacagacatgaagattcgacattagcaacagataaaccctcaccccaaatcttgtcttcttcggtactaggcccatcctttttattttttaaaggaagaatccaaggttgagagtattcatcaaataatctgcattgtattgttcctttgaatctgtcgtttccatgtgccatacctcagagtgctggtgaggtaactgtgggttgcccttggctgcatctccctcctcccagtcttaaaggggtgtccttggtcctcggccagcatcagctttacaagtgccttggtatgtgcctttggaaaacactgcatgttgatgatgctgcagccttactgccaggctagacacccagctcagaagggtgccaagacctctagaagtcactgtgcacataagcattgctggaattgccaccagctgtcatcctgcagtcctttacagttcaacctagtgatagaaaccgtcctggacagctcacccagtgttcctctaaaatcttggttaacaggaatgtccaaagtcaccatcctctcttggaccctggccagattaccagccaccaagttcagtggaatttccccaggatttaatgaaacaaagagagcattgtgcttctcaggttccttggggggtgttgggggggattcttctgtggagatgaaaagagaggagggggaggacactggaaaactattttcccttctgcatatgccttccactgcctcccagcttggactgctgagaggtgtggtgatagatagcaacggaggcccaagatctctctcttagaggcatcaaggggacctggaagccgagatggagctccggttggttttgacacggcccttatttagtgcagatgctcctgtgtttccttgggacccttaggtacatcagggagggactgtagaaaattcctgccttcctcagggtctatcctgggctatctactgagaggatccacagtcggtgtctctccttatgcagatggaaagatgctcagcgtcagatatcaagacttacaaacacaatgctctgtgtgtgtgtgtgtgtgtgcatgtgtgtgtatgagtgtgtgcatactcaaccatctatgtgtgtatatgtgtgtgtgtgcatgctcaaccatctgtgtgtgtgtgtgtgtgtgtgtgtgtgtgtgtgtgtgtgtgtatacccgtgtatgcatgcagatagaatggtaaagaagagccctgaagaactgtaaggaaacatgtagaaaacttgggtttttctgcctccttttctgttgcccgacaggacagctgagcttgcttcctaatcagcctaaaggtcaaacctgggaagtcagtacaggagggtgaaggttcagaggtcaacccctgcccatgtgaccatctctgggtccctctgctggtatttggatggctgaagatacttgggaaaggctgactggctgtcccagccccagtgtatctcattcattcctgacaccgacgctatgattctctgcttttctagttatgggatgtgtgtttgtcttctgaaatggggccttttgagttagaaaatctgagaccagtcttcgatggtgaggtttttcagaagagaaagagaaagtaatatgtgtgactggttttaaataaaatacgtctctacatgttaaaaaaaaaaaaaaaaaa

SEQ ID NO: 1344 - DNA, 3974 bp, Rattus norvegicus
aaaaagaggaaagacagagccggcctagacagcagacatcaggacacccttctaggccagctctgttttctgccttaatgctcaaggaagactgcaagatcatctgaggtgggctctgtaacagcgtcagctccacaaagtcatcgctgcaaagttcaggagatgggagatctttcctgttttcttactgagtgtttccgggtgtgagtgcatcgcattgacatcttcctacctctgtggacaaacaaggacaaggctcgaatcccctcagtctacttcatcagccggacctgcatgactggctattttgaccacttgaagtcatctaaatagaagttctcaagaccaccaagaccaaggacacttcacatgacagatgagcgaccatcccctgaaggagatgtctgacaacaaccgcagcccccccttgccagagcctctttccagcagatacaagttgtatgagtcagagctaagcagccctacctggccttcaagctcccaggatacacacccagcccttcccctgctggaaatgcctgaagaaaaggatctccgatcatcggatgaagacagccacatagtgaagattgaaaagcccaacgagcggagtaaacggagagaaagcgagttgccccgcagggcttctgcaggccggggagcgttcagcctcttccaagctgtgagctacctcactggtgacatgaaggaatgcaagaactggctgaaagataagcccctggtccttcagttcctagactgggtcctgcggggagcagctcaggtgatgtttgtcaacaacccccttagtgggctcatcatcttcatagggctcctgatccagaatccctggtggacgattgctggggcactggggacagtggtctcaaccttggctgcccttgccttgagccaggacaggtcagccatcgcctctggactccatgggtacaacgggatgctggtgggactcctggtggctgtcttctcagagaagttagactactactggtggcttctgtttcctgtgaccttcgcatccatggcctgcccagttatttctagtgccttgagcaccgtcttcgccaagtgggacctgccagtcttcacactgcccttcaacatcgccttaacactgtacctggcagctacgggccactacaaccttttcttccccacgacgcttgtgaagcctgcgtcttcagcgcccaacatcacctggtcagagattgagatgcctttgctgttacaaaccatccccgttggggtgggccaggtctacggctgtgacaacccctggacaggcggcgtgatcctggtggctctgtttatctcctctcccctcatctgtttgcacgcagccataggatccattgtggggctgctggcagcactgacggtggccactcccttcgagacgatctacacgggcctttggagctacaactgtgtcctctcctgtgtcgccattggaggcatgttctacgtactcacctggcagacacacctgttggcacttgtctgtgccctgttctgtgcgtacacgggagcggccctctccaatatgatggcagtggttggtgtgccaccgggcacctgggccttctgtctctccaccctcaccttccttctcctcacaagcaacaaccctggcatccacaagctcccactcagcaaagtcacctacccagaggccaaccgcatctacttcctgacagcgaaacgcagtgacgagcagaagccccccaatggtggcggtggagaacagtcacacggaggaggccagcggaaggcagaggagggctccgagaccgtgttccccaggcgtaagagcgtgttccatatcgagtggtcatccatccggaggaggagcaaagtgtttggaaaaagtgaacaccaagagagacaaaccaaagagccactcccctacctgtatcggaagcccacagtggaactcttggacctgaacaccatggaggagagctctgagataaaggtagaaaccaacacaaccaggactacctggatccagagctccatgatcgctggggggaagagagtcagcaaagccctcagctacatcacaggagagatgaaggagtgcggcgagggacttaaagacaaatctccagtgttccagtttcttgactgggtgctccgaggcacgtctcaggtgatgtttgtgaacaaccctctcagtggcatcctcatcgttcttggcctcttcgtgcagaatccctggtgggccatctccggttgcttgggcaccatcatgtccaccttgactgccctcatcctgagccaggacaagtcggccattgcagcaggactccatggctacaatggggtgcttgtggggctcctgatggccgtgttctcagacaagggcaattactactggtggctgctgctcccggtcatcgtcatgtccatgacttgccccatcctctccagtgctctgagcaccgtcttcagcaaatgggacctcccagtcttcacactgcccttcaacatcgccgtgaccctgtacctggcagccacgggccactacaatctcttcttccccacgaagctgctgcagcctgcagttaccacacccaacatcacctggtcagatgtccaagtgcctttgcttctgagagccatccccgttggaatcggccaagtgtatggctgtgacaatccctggactggaggcatcttcctcgttgctctgttcgtctcttcacctctcatctgcttgcacgctgccatcggatccacgatagggatgttagcagcactcagcattgccacaccatttgactccatctactttggcctgtgtggcttcaatagcactctggcctgtatcgctattggtggcatgttctacgtcatcacctggcagacgcacctgctcgccattgcctgtgccctgtttgcagcctacctgggtgctgccctggccaacatgctgtctgtgtttggattaccaccctgcacctggcccttctgcctctcagcgctcaccttcctcctcctcacaaccaacaaccctggcatctacaagctcccgctcagcaaagtcacctacccagaggccaaccgcatctacttcctgtcccaggagaaaaacagaagggcatcgatgataacaaagtaccaggcctacgacgtctcctaagctgccctttctaagctcgtctggtaaatgcagcctccagaacccaccctgcaccccaggctaaatctaagtcactcaaccacccttcttcctaatatgcgagtggctgctatttggagccctcaatgagatgtgcagcgctcatcaaagccacgctagtttaaactaaatacccaccgatggctctttgggaactctctgtggggggaacttgctagtcacctctttcagttatttagtggcgcaaatcatgattccaggaaatgttcattagcctgccatgcaagagggctgggttcactaatgagttccaactgtctcaggccagtcttctccctaccccatccccacccctatccacacccaccccacccctcatctcagcctgggtgttttgttgccaaggatttctttaccatgacaaggaaggactccaaagtccttccacctcagaagcatttattcttttccatatcctgtaaactaaccaactcagcatggccagcaagtaattattctgacttgagttacttatggaatggctctcagaggagagaggaaaatgttagtgccctgtggaagtttattcttagatatctgggagatgctctaaggcttgggaccggacacctgaattcattgaaaatgccaatgtatcttctttgcaccatagaaatatttccagaaacatcatctggtaaggagtgaccttttccaacatccaatcatagtgtaagcaaacgtctttgcttgtgtaatattcaaaatcagtagtcattaaacttgaaatttgcaaaaaaaaaaaaaa

SEQ ID NO: 1345 - DNA, 3504 bp, Rattus norvegicus
ctctgcttttctctttcagagctgttgcgcagccattggtacctgtattggggaaacatagcatacaagcaagaagcttacagcctcagtggcgaaaaatttttcatgtcagagaccgagaactcttgcagtcgtttatgtcatcccttcttctccagacagaagataccaaaaagttgcaatcaaagatctgttcatcttattgataaagtcactaataagccaaaatgtctgtcaacgtcaaccgcagcgtgtcagaccagttctatcgctacaagatgccccgtttgattgctaaggttgagggcaaaggaaatggaatcaagacagttatagtcaacatggttgacgttgcaaaggcgcttaatcggcctccaacgtatcccaccaaatattttggttgtgagctgggagcacagacccagtttgatgttaagaatgaccgttacattgtcaatggatctcatgaggcgaataagctgcaagacatgttggatggattcattaaaaaatttgttctctgtcctgagtgtgagaatcctgaaacagatctgcatgtcaatccaaagaagcaaacaataggtaattcttgtaaagcctgtgggtaccgaggcatgcttgacacacatcataaactctgtacattcattctcaaaaacccacctgagaatagtgacattggtacaggaaagaaagagaaagaaaagaaaaatagaaagggcaaggacaaggaaaatggctctgtatccaccagtgagacaccaccacctccaccaccaaatgaaattagtcctccacatgctgtggaagaagaggaagatgatgattggggggaggatacaactgaggaagctcaaaggcgcagaatggatgaaatcagtgaccatgcaaaaggtctgacacttagcgatgatttggaaagaactgtagaagagcgtgttaacatcctgtttgattttgttaagaaaaagaaagaagagggcattattgattcatctgataaagacattgtggctgaggcagaaagactggatgtaaaagccatgggccctctcgttttgacagaagttctctttgatgagaagataagagagcaaatcaagaaatacaggcgccattttttaagattttgtcataacaacaaaaaggcccagcggtaccttcttcatggtttggaatgtgtggtagcaatgcatcaagctcagttgatctccaagattccacatatcttgaaggagatgtatgatgcagaccttttagaggaagaggtcattatcagctggtcagaaaaggcctctaagaaatatgtctcaaaagaacttgccaaagagattcgtgtcaaagcagagccatttattaaatggttgaaggaagcggaggaggaatcttctggtggtgaggaagaagacgaagatgaaaatattgaggtggtatattcgaagactgccagtgtaccaaaagttgaaactgtgaagtctgacaacaaggatgacgacattgatattgatgccatttaaaaggatggatgcaacttagcttaacagtgtaatgctgcaaatttttctccattatcagccagaagtgcaacatgtatgtgcaagagctaaagtggcttaacatcatgctacacttgatactaaaaagctattactgtgagtggtctataattaagcccaatgagacatctagggagtccatacatatcagtgagcagttgtagtttgcttatttatagcatgtttctttcggaaaaactagtggtggacacatttggatcacatttatacagttataaaaaataaagatttgattttggtcattcttcagactttgggctatgaatggcttatgctgaagtaattggctacttttaggatgttacaccatttaataacttagacttcttaagtttggtagattgttaggtactgaagacttgaagaatgcaaacaattataatgaccttactcagccattaagaaatgaagtattttgaaagttgtgtctccagtccattgagattggcaactgacaattcttgtcattctaaggaaatttgatgatttaatgacagtgtgacatcctcatgagaagtaaaaatgacctgtgtgtcctatggtttaagagcaaattttgaaacttggagttgtggtttttcagtttgtgtacactcaccccaaattgtagtctattgagtcatgtgcattgcacgttggataagccagggaaatgacaaataagtattttgtgtgtatttagtggttgctttgtactgagagaaaagctttgaggtgtgattaaatcgtaaactctgattctatttgggagaaacaggaaaaaggtgcacttaatctaaaacagcataagttttcaacttttacccttaaattataatttcaagatgtttagacatactgtatcttgtgtttgatgtgttccccctccctaatattatggtttattctttaatgccttttaatttggatataatagcttgtactttagattttggttgctatcttgccaaaataagtgttactgtttttcaagcttgatccccttccctgattgtcttatttaaagagaaagttaaactcatacttctgagtcagagcctgtattttggttaagacttgggatattttttacttcacattgaatatagctggatacctgagaagtctggtgatggcactgggtgggtgcagctagctaaggcctgaccagcccattcagagccttggacttcagacacaaaagtgagtttcttacccacttgctggtgtaaactctatctggggtcctgactatatttgaatacttgtcttcaatattaaaaaacatagcacatttttctttctacaaaagtacattctggagttaagaacccatgtggttgatttgtgtgtggcgtgctagctcatacattatttggatcttattctttgtgtcatccatctcacagattataagactttgattaatgtaaaaagtatgcgttaaaatcataccaaacatttggtaaaattaaaaccttgatgggaggctgggcgtggaacaggagccatatacctggaatggtaacaggggaatgtgctatgtcacaccaaagaagtgggacttggaaagtcacttgtctcctgggtttcagactctttgttgcatgggcagcccatccatatgtcattactttttgagattctcaagtagatcagcacatttcggcctcaggttggcaagattttgtcttagagctgttgctttaaagggaaatggtcaggtcttagacacttaggaaggtcttgggcttctgttcattctggtgccaaaccagtgggattcaaatttcacacaatctgggtttttattcatggaggttaacctggtaagagtaatccttcatggctctattgaggtgtcttaaaaagtttcctgtttcaaacagctacattacttgattaaaacaatgttataaaattaaatttccccctcctttcatattaa

SEQ ID NO: 1346 - DNA, 651 bp, Rattus norvegicus
ccttcctgggagcatgctgccaggggacacaggtcctccagcaagtattcacgtagcctccaattaataagctcctctagggctatgaggtgaactcccttagggaggcaggtggacagcagaggaagcagaaacccagaggtgtgagctgggaagccgggccatgtcaggaagccaactgtgggctgctgtactcctgctgctggtgctgcagagtgcccagggtgtctacatcaagtaccatggcttccaagtccagctagaatcggtgaagaagctgaatgagttggaagagaagcagatgtccgatccccagcagcagaaaagtggcctcctccccgatgtgtgctacaaccccgccttgcccctggacctccagcctgtttgtgcatcccaggaagctgccagcaccttcaaggccttgaggaccattgccactgatgaatgtgagctgtgtataaatgttgcctgtacgggctgctgatgaaatgactccagacacctacccccacagcctaccctgcccatacttaggtaccattgacataattaccaccctcccagcacaaatggatccatagcaagacaatatggatgcagagccgccatatttggtccccaggcagctgcaccggaataaaaatgttaccc

SEQ ID NO: 1347 - DNA, 2410 bp, Rattus norvegicus; identical to SEQ ID NO: 1184

SEQ ID NO: 1348 - DNA, 5215 bp, Rattus norvegicus
gagagcccagccttctccctggctcctatttaagcatcaggcaaagaccgtgggtcccagcaacagcagtgaggaggcacttggcacttcgggcaggtggtagccgctgtgcctggcaccttggcatcctgcctgggctgcacgtggcctggcacccatacagctcctgattgctgcggctggaaggagcctgtgattctgcgtgagtgtggggtccttgggtatacagtcagccgaggtagaggtgggctggcctaggactgtacacttctctaggagctgggcttaactaaaacagaagagattgcggttagacatcaagaggaactcagacccgtgggaaagaaccaggacctgaggcaaaggcgagatttgggtggtggacgggggacagggagactcttcacagtcctcacaggacctacacaggggcctatggtctcagacctgggatcatgttcctgagggggtataagagagaggggcaggtcaggaagcataggaagtcagttgcacatgggggagggttgtggggaaactgtaaaagctatgctggggaggcggcacggagcttgattcaccttcacctgcgccgggcacccgctgaccccgggtttccgcccggagagcagtcagatatgaacggacgggtggattatttagtctccgaggaagagatcaacctgaccagaggaccctcggggctgggcttcaacatcgtcggtgggacagatcaacagtatgtctccaatgacagtggcatctacgtcagccgcatcaaagaggatggggctgcggcccgggatgggcggctccaggagggtgataagatcctctcggtaaatggccaagacctgaagaacctgttgcaccaagatgccgtagacctcttccgtaatgcaggatatgccgtgtccctgagagtgcagcacaggttaccagtgcagaatggacctatagttcatcgaggcgacggagagccgagtggagttcctgtagctgtggtgctgctgccagtgtttgcccttaccctggtagcagtttgggccttcgtgagataccgaaagcagctctgagatgcctgttgtcttccagtgtgtccgatgagctaactatctctctcactcaccatctcgacatcctcccctagtcttccttcccacatagccaacacatgatttaaagtgactgcttatcacccgaaaccttgctgttcaaaatctccaagacttcacattctaatggaagagtaaagagattatttgaagaaagctgggggtggggagagccttgcttagaataaatgagaagttacatattttactagaactgccaataaaaattcagctatcagccaaagaggagaagcttgctcttcctgtctccatggacgacaccttttgcttagctggtgtgctttgaaggctagctgtgctatgtgaaaggaggagctgattttttaaatactttttcttgggaagtatttgtggcctttaatttgtaactatatacttagatgcctatattggacataggcgaatgaatttttttcttttcttagaaaagaaaatacatatatacattaacacacacacacacacacacacacacacagcataaaactgatgccttatggagagttaaagaggtgagaaaactactggttcttggatttctagtggacaagttttgggaactagggggtcatattcctttatatataatcaaaactcatattaaagaatgagttctggattgtaaagagaacttactttttccacttgtctgtaagtctttgtccacaagttaaaaacatacacagtcctaagggctgatcataactgaaacacttcaaaaattattggcagagaaggtataacggggatggaaaagttagctttaaaagagaatgctcagtcagtggcattaggaaaataatgactgaagcaattagttgaaaactgtagaacaactagtgttccagggtagctacagtgatgtgggaaattgtggcaaagcagttcttctcaagtcaatttgtttaaaagactttggggtgtaaagatgagtcctgacagtctctgaatgaccttagtgactgttgtactatgtgaaaggatccattggcatggagatgagaagtaggagggccaaataaaccatcaagacaactgaaaaaagatcatacctcagggtggcacttgaaccctcaaagtgctcaccaactttcagtttctagtatcaggcaaagcctaagggaagggactgctttcctggcagggtggaccccaaatcagcctgcttctgatagagttacgatgagaaggcccaaattgatgtaggctttctttttgtgtatttttcccaaagctataagcactagttttggttttaataaggtaatggaccattttttcagaaaaaggggaaggaataaggtttgtttgtttatagagggtgcaaggaagtttagtgagcatttctgaggaaagcctgagcacacagagtagattaactatgccagagaatagccagggatattggggggtggggggtagtggagctgtcctgtttatgtagcatcaaagttggttttagagtactgaggatagttgaaccaagcctaattttttttttcactttaacaaaataatttccgtcttttcaataaattggccagactattttgacctaagattataaagagttttcctgacaacctagcagtcacttaacagatgtcgattgcacattagttttgtcaagacacctttataacaaagggaaatgcacacacttcatccaaaaggacattgtggttacagttaggaagaaaacacttaagatggaattatccatgtaagtgtaagttgtttatattacagacaacaaaagaaaatagctcccaagctttgagcactgaagatctcagaggaaggactccttaggtgccaatcgtctagcaagcatgcatacataggggacaagttaagagtcttaccgggttgagtaagaaaaggaaattattgccatgcgagacagagcacgatgcagcaatgtggaggatgagcagacagctagcatgttgtaaggagctcagaacgggagagccttcctgcagtggcatcgggggagaatgcaaaggaaagtcttgaacagtccagtgagcctttgcctctggataaactgttgatacagggagacatttgctttaaacagtcttcacataaccaagccattcagtacttcttgaaactgacttcataacaggagtcattgtaagttccacagaaagcaagacgtatgtatttcagttcttgtcttgaccagcagcactccggaggcccagtgtccggtgccctccttgtatctgaagcaggggtaacagctctgctgtgggcctgtttccctctagtatttacctcaaggcttggaaatgtattttgaaagaccttcagtcaaacgaagtaaagcaaatgtcaagaaggataaaccactgttgtgtgttgatgtgtggtgtattgtgatgtaaataaaaaatatcgttgaagttttactttgtaaagattctggtaacacttgggtctccttgggaaagaaacaacacttgaccaaagcatttaagttttaggcaaattccataatatttcactcttagttataaaattatcatacatgagatgttgaggatctatatagattattcagattttatattccttatagattgactcaaatattccttaaaagattatatatgatgctcctatggcataaattgtaatgtttaatgttttgaaaattggttataggtattttttaagttcccataaagtgtttcttgtatttgtcattgtgaattatatgtaattctaatagatattgtttgctttagtcatttttgtctccttttcctatagtttcctgtgtgagtgattccatgtaattaattggacagtctatccacaggcaacaaatagaagtagtatttgtaattgcagcctgtgccagggactgtgttagactgattagtaacactatgaatcacccgagatcttaagtattgctataaagagaagactgaagatgagagagtaaagtattttcctgggattatatagttggtaaaaaagaatcatgatttaaactctggactttggataaaagtatcagtaattttcctcattgctagcagtcctcatgcaaggtctctggactaaagcgatgtattacctgcaaatgcttgagtttcatcccatacttatggcgtgaggtgagtgtggcagccagcatctctgtcctcctaggtaactggttagtgctgaacctcgagattcaccactgtcaggagctgtctctgcttagaatcacctggacagctggctgtcaacccacgttaagtaagaacatgtgggactagaattcagtcaacaataaaagctttcatcaggtggctaaaatgtgcagactctgtttgtactggcatgttggccatcactcacagatgcaactctagccagaatcaagaatggggcagatccagagcccagctcgctgagcttctgccccagatttcagaggcagagtaagaagtggaacagtgttttcctcccaggtgctcaggacaggctggtcaacttccagtcacatatgccatttagtaagtgcttcggcctgtgcagccattagtaaccaaatcatgggatagtgaatctaaaatactcttggataaaatttgtattagaattaaaaaaaaatgagggtcagaaaggtgaactaactccaacttagatgcccctcccctttattttggtctcaaatctgttttaatgtgtccacaacattaatcaaaaactgtattttttttttttcggagctggggactgaacccagggccttgcgcttgctaggcaagcgctctaccactgagctaaatccccaacccccaaaactgtattttaaaaatcagttcactttcatctttttttccttgggttttcagtaaagaccagaaggactgacagacagctagagaggttgtgtagacatccagatggggagagtgcattggacaatctgagaaatctattcaggtgctgcctaattccattagctttaagttagatacaagctgtttgtagtattttgggttttattgtgcaaataaacaatagaggcctttagtcccagcgttaggatgcagagatccatttct

SEQ ID NO: 1349 - DNA, 952 bp, Rattus norvegicus
cggccaggttgacagttgggcagaagctcttggttcctcttcaagtggtaatgccttcatgccaactttgccgaagtaacctggatgatatttgtcaaagttgatcctgtggtgatgcatgcctccagcattcccgcggcctcctgggtgcttgcggtgcttaccgatgcgaccgtggccgtggctcacgtggccccggagtttccgtcttcctaccagtctggatggcatggcggtgcagattcttttcagtcctctgaagactgcacacaggatggctgcaaacaagcccaagggtcagaattctttggccttacacaaagtcatcatggtgggcagtggtggtgtgggcaagtctgctctgactctgcagttcatgtatgatgagtttgtagaagactatgaacctaccaaagcagacagctacaggaagaaggtagtgctggatggggaggaagtgcagatcgacatcttagatacagcagggcaggaagactacgctgcaattagagacaactacttccgaagtggggaaggattcctctgtgtcttctctatcacagagatggagtcctttgcagctacagcggacttcagggaacagattttaagagtaaaagaagatgagaatgtcccatttctcctggttggtaacaaatcagatttagaagataaaaggcaggtttctgtagaagaggcaaaaaacagagctgaccagtggaacgttaactatgtggagacgtctgctaaaacgcgcgccaacgttgacaaggtattttttgatttaatgagggaaatacgagccagaaagatggaagacagcaaagaaaaaaatggaaaaaagaagaggaaaagtttagccaagagaatcagagaaagatgctgcattttataatcaaagcccaaactcctttcttatcctgacctgaccatactaataaatataatttat

SEQ ID NO: 1350 - DNA, 3272 bp, Rattus norvegicus
gcggccgcagctgccgggagatgcgagcgcagaccggattgtgatcacctttccctcttcgggctgtaagagagcgagacaagccaccgaagcgaggccactccagagccggcagcggagggacccgggacactagagcagctccgagccactccagactgagcggacgctccaggtgatcgagtccacgctgcttcctgcaggcgacaggcgacgcctcccgagcagcccggccactggctcttcccctcctgggacaaacttttctgcaagcccttggaccaaacttgtcgcgcgtcaccgtcacccaaccgggtccgcgtagagcgctcatcttcggcgagatgtctgagcgcaaagaaggcagaggcaaggggaagggcaagaagaaggaccggggatcccgcgggaagcccgggcccgccgagggcgacccgagcccagcactgcctcccagattgaaagaaatgaagagccaggagtcagctgcaggctccaagctagtgctccggtgcgaaaccagctccgagtactcctcactcagattcaaatggttcaagaatgggaacgagctgaaccgcaaaaataaaccagaaaacatcaagatacagaagaagccagggaagtcagagcttcgaattaacaaagcatccctggctgactctggagagtatatgtgcaaagtgatcagcaagttaggaaatgacagtgcctctgccaacatcaccattgttgagtcaaacgagttcatcactggcatgccagcctcgactgagacagcctatgtgtcctcagagtctcccattagaatctcagtttcaacagaaggcgcaaacacttcttcatccacatcaacatccacgactgggaccagccatctcataaagtgtgcggagaaggagaaaactttctgtgtgaatgggggcgagtgcttcacggtgaaggacctgtcaaacccgtcaagatacttgtgcaagtgcccaaatgagtttactggtgatcgttgccaaaactacgtaatggccagcttctacaaagcggaggaactctaccagaagagggtgctgacaattactggcatctgtatcgccctgctggtggtcggcatcatgtgtgtggtggcctactgcaaaaccaagaagcagcggcagaagcttcatgatcggcttcggcagagtcttcggtcagaacggagcaacctggtgaacatagcgaatgggcctcaccacccaaacccaccgccagagaacgtgcagctggtgaatcaatacgtatctaaaaacgtcatctccagtgagcatattgttgagagagaagtggagacttccttttccaccagtcattacacttccacagcccatcactccacgactgtcacccagactcctagtcacagctggagtaatgggcacacggagagcgtcatttcagaaagcaactccgtaatcatgatgtcttcggtagagaacagcaggcacagcagtcccgccgggggcccacgaggacgtcttcatggcctgggaggccctcgtgataacagcttcctcaggcatgccagagaaacccctgactcctacagagactctcctcatagcgaaaggtatgtatcagccatgaccaccccggctcgtatgtcacctgtagatttccacacgccaagctcccctaaatcgcccccttcggaaatgtctccacccgtgtccagcatgacggtgtccatgccctctgtggcagtcagcccctttgtggaagaagagaggcctctgctgcttgtgacgccaccaaggctacgggagaagaaatatgatcatcacccccagcaactcaactcctttcatcacaaccctgcacatcagagtaccagcctcccccctagcccactgaggatagtggaggatgaggagtacgagacgacccaggagtatgagtcagttcaagagcccgttaagaaagtcaccaatagccggcgggccaaaagaaccaagcccaatggccacattgccaataggttggaaatggacagcaacacaagttctgtgagcagtaactcagaaagtgagacagaagacgaaagagtaggtgaagacacaccattcctgggcatacagaaccccctggcagccagccttgaggtggcccctgccttccgtctggctgagagcaggactaacccagcaggccgcttctccacacaggaggaattacaggccaggctgtctagtgtaatcgctaaccaagaccctattgctgtataaaacctaaataaacacatagattcacctgtaaaactttattttatataataaagtatttcaccttaaattaaacaatttattttattttagcagttctgcaaatagaaaacaggaagaaaaaaaaacttttataaattaaatatatgtatgtaaaaatgtgttatgtgccatatgtagcaatttttttacagtatttcaaaaacgagaaagatatcaatggtgcctttatgttctgttatgtcgagagcaagttttataaagttatggtgatttctttttcacagtatttcagcaaaacctcccatatattcagtttctgctggctttttgtgcattgcattatgatgttgactggatgtatggtttgcaaggctagcagctcgctcgtgttctctctctctctctctctctctctctctctgtctctctctctgtctctctctctctctctctctctctctctctctctctctctctctctctctctctgtctctctctctgcttcccgtagctcccaaccagtactgtcttggactggcacatccatccaaatacctttctactttgtatgaagttttctttgctttcccaatatgaaatgagttctctctactctgtcagccaaaggtttgcttcactggactctgagataatagtagacccagcagcatgctactattacgtatagcaggaaactgcaccaagtaatgtccaataataggaagaaagtaatactgtgatttaaaaaaaaaaacaaactatattattaatcagaagacagcttgctcttggtaaaaggagctaccattgactctaattttgactttttagttattgttcttgacaaagagtaacagcttcaagtacagcctagaaaaaaaaatgggttctggcctgctatcaggataaatctatcgacgtagatagattcaactcagtttcactttctgtcttgggggaaatgatccagccactcatatgacgaccaaccaaccacaggtgcctctgctccctgt

SEQ ID NO: 1351 - DNA, 4245 bp, Rattus norvegicus
ctcggcggctccgcagcggctgcagcgggaggacccggccggagccgccgccgccgccgccgccgccatcgcagccgggcggccgggcccccgccgccgggatgccaaggagccggggcggccgcgctgcgccgggccaggccgcgcgctggagcggctggcgggccccggggcggctgctgccgctgctgcccgcgctctgctgcctcgcggcggcggcgggggccgggaagccggccggggcggacgcgcccttcgccgggcagaactggttaaaatcctatggctatctgcttccctatgagtcgcgggcgtctgcgttgcattcagggaaggccttgcagtcagcagtctccactatgcaacagttttacgggatcccagtcaccggtgtgttggaccagacgacaatcgagtggatgaagaaacctcgatgtggcgttcctgatcatccccatttgagcaggaggaggagaaataaacgctatgccctaactggacagaagtggaggcagaaacatatcacctacagcattcacaattataccccaaaggtgggtgagctggacacacggaaggctattcgtcaggctttcgatgtgtggcagaaagtgaccccgttgacctttgaagaggtgccataccatgagatcaaaagtgaccggaaggaggcagacatcatgatcttctttgcttctggtttccatggtgacagctctccttttgatggggaagggggcttcctagcccatgcctactttcctggcccaggaatcggaggagacactcactttgattcagatgagccctggacactaggaaatgccaaccatgatggcaatgacctcttcctggtggccgtgcatgaactgggccatgccctggggctggaacactctaatgaccccagtgctatcatggcacccttctatcaatacatggagacgcacaacttcaagctgccccaggatgatctccagggcatccagaagatttacggacccccagctgagcctctggagcccacaagaccccttcctacactcccggtccgcaggatccattcaccgtctgagagaaaacatgagcggcagcccaggcctcctcggccacctctgggggaccggccatccactccaggtgccaagcccaacatctgcgatggcaacttcaacacagtggccctcttccgaggggagatgtttgtgtttaaggatcgctggttctggcgtctgcgcaataatcgggtacaggagggctaccccatgcagattgaacaattctggaagggcctgcccgcccgcatagacgcagcctatgaaagagcggacggaagattcgtcttcttcaaaggtgacaagtactgggtattcaaagaagtgacggtggagcctgggtacccccacagcttgggggagctgggaagctgcctgccccgtgaaggaattgacacagctctgcgctgggaacctgtgggcaaaacctactttttcaaaggcgaacggtactggcgttacagcgaggagcggcgagccacagaccctggctaccccaagcccatcaccgtgtggaagggcatcccgcaggctccacaaggggccttcatcagcaaggaaggatattacacctacttctacaaaggtcgggactactggaagtttgacaaccagaaactgagtgtggagccaggctacccacgcaacatcctgcgtgactggatgggctgcaagcagaaggaggtagagcggcggaaggagcgcaggttgccccaggatgatgtggacatcatggtgaccatcgatgacgtgccaggctctgtgaatgctgtggctgtggtcgtcccctgcacactgtccctgtgcctcctggtgctgctttacactatcttccagttcaagaacaagacgggtccccaacccgtcacctactataagcggccagtccaggagtgggtatgagcagcccagagccctctctgtctacccagtctggccagccaggcccttcctcaccagggtctgaggggcagctctagccactgcccactggggccagcagggccctaggccaggttcgtgtgtagctgaagtggtgggtacattggtctaggctgagtgtggggcagggagtgatggtggctatgccccaggttgggtagctggtacccagctgccagccttctgtcctgggtagacccctctctactcaagggaataggccaggccctgtcaggaggcaaggatcatgccaggaggtgcccctgaggtctctgcatcctgtggtgtctgcaagatgccgcagttccagtcccggctgggacccagccctctgaggcaagccagcactagctctcacccccaccccaagatgccaccaatcccagtcccctctgccaacacctgctggtcagatgtcccctcacccctaccctactatcctccaaggctgcagtgcccctgatgccaacacagtgggcaaaggcctgggtttcccctgctagctaacagcagattcctcaggaaacctgctccacctgtcaggtctcctctgagactcagaatttagggtcacatgctgcaggcaaggctgtggcccgctggatctcacaaggacccagctgtcatgtcgtgaatatttaaatgtcctgtcactactgtttaaagtcccattttgcaaaggctacttgaggctttaggtcagctagaggtgactgtcttggtgatgaggccagagtggtggcccttccccaggcactaaggactatggtgctgcaagggccactcgggcatcctgttcaggagactcaacagccagggcaggagctgaccctggttctgggggcggatccaagtttgtgactattctctactccccttccttaatgttgtcccctgccttgctccagcctgtcctctgtggcctgggggctcagtctgactataggtaaagcagagatgattctagagccaccattgtcataaggaccagggcaatctttaaagtactccatccacatccccatctgccctgaggcaactcagtttcagactggaggcatgtttgtgctccaatcttgaccctggaagcccagctcactgggcccatcttcctgcactgctcttacgaaaagggtactcacagccggtagcagccccaggctttgggacttcccctcgctccctaccccaacctacctttcttttgttttaacctgaggcccttcacatctgacagaatccctaagccttggcttgacttgctccaaaaccactgggtgcagtgttgttcgctggctctctgctaagcccaacagtggtaggaggcggccatcagggtgctagtgggtcacagataccaactctgacctctgagcctgcatgggctttgcccctgccctgtggtctctgggatttgggtcagctcgtcctgtagcagatagggactctcgctgggttgggagctaagtgaaatctcttgtcccagaagcacctatgtgggtccatcgtgtcccatctcaccatcgtgttctttctcattttggccaagggcaggctccccagggcaggcggggaacaactgcagagatttcgtgattcataggtttgtagtgttttatactttgcaaagcactttattagctcacacctgtccactcacacggaactcctgtaggctctgagaggctgagggtaattctcctcttaccctcagatgaagcacaaggaggtcttatctgcccctgccatccagtgaccctggctgggtctgtgtccccatctgtgggtccttccagggcctgagatcaatgtctcttctagtcctctcttctgggcctccctcccctagtttcctggtccctctcctcagcttggtgctctcacttcttgaaagctctaggccccgcaggctccctgttgactcctggcattccaaggccagctgagaaagagcaggaggtggaagcaggcagcccaggctgcagatgtgaggggtgcagggccgggcccagagagggctcagcctagaggcttccaatcttggattcttctgcctgtggtcatctgtctgtccatcagcccaggtcagagcagtcagaggggcaaagtactggagcccccccagagctcagcttcccctcagcctgggtgacatcacagcatttcagtgtcggtcacattttaaactgatcagcctttgtacaatgttttttaaatcatttctaaataaaacagaaatacagtgaaa

SEQ ID NO: 1352 - DNA, 1342 bp, Rattus norvegicus
gcagccagacgccaggctggatgaaatgaagaaggcaatggcaggcagtggtgccagcctctgaggtgtcgagctgctacctcccaccgctcatctctcacacaatgccatcaaacccctgcaagccacacttcttgccagccacctggcacccgaatctcagggcctcctgcatgctgtttcccttggagaggctgaagagacagagtctagcaggaatcccctccgcttgcgggtaggaagcttggggagcagcctcatggaagagaagcagatcctgtgcgtggggctggtggtgctggacatcatcaatgtggtggacaaatacccagaggaagacacggatcgcaggtgcctatcccagagatggcagcgtggaggcaacgcgtccaactcctgcactgtgctttccttgctcggagcccgctgtgccttcatgggctcgctggcccatggccatgttgccgacttcctggtggccgacttcaggcggaggggtgtggatgtgtctcaagtggcctggcagagccagggagataccccttgctcctgctgcatcgtcaacaactccaatggctcccgtaccattattctctacgacacgaacctgccagatgtgtctgctaaggactttgagaaggtcgatctgacccggttcaagtggatccacattgagggccggaatgcatcggaacaggtaaagatgctacagcggatagaacagtacaatgccacgcagcctctgcagcagaaggtccgggtgtccgtggagatagagaagccccgagaggaactcttccagctgttcggctatggagaggtggtgtttgtcagcaaagatgtggccaagcacctggggttccggtcagcaggggaggccctgaagggcttgtacagtcgtgtgaagaaaggggctacgctcatctgtgcctgggctgaggagggagccgatgccctgggccccgacggccagctgctccactcagatgccttcccaccaccccgagtagtagacactctcggggctggagacaccttcaatgcctctgtcatcttcagcctctccaagggaaacagcatgcaggaggccctgagattcgggtgccaggtggctggcaagaagtgtggcttgcaggggtttgatggcattgtgtgagagatgagcggtgggaggtagcagctcgacacctcagaggctggcaccactgcctgccattgccttcttcatttcatccagcctggcgtctggctgcccagttccctgggccagtgtaggctgtggaacgggtctttctgtctcttctctgcagacacctggagcaaataaatcttcccctgagcc

SEQ ID NO: 1353 - DNA, 3513 bp, Rattus norvegicus
gtgcagccaccctcgcctgcctcgctcttccttccttcgctcgcaccatggctgatcagctgactgaagaacagattgctgaattcaaggaagctttctccctatttgataaagatggggacggcaccatcacaacaaaggagctggggactgtcatgcggtcactgggtcagaacccaacagaggctgaactgcaggatatgatcaacgaggtggatgccgacgggaatggcaccattgacttcccagagttcttgactatgatggctagaaaaatgaaagacacagatagcgaagaagaaatccgtgaggcattccgagtctttgacaaggatggcaatggctacatcagtgcggcagaactgcgccacgtcatgacaaacctcggggaaaagctaacagatgaagaagtagacgaaatgatcagagaagcagatattgatggagacggacaggtcaactatgaagaattcgtacagatgatgactgcaaaatgaagacctactttcaactactttccccctctagaagaatcaaattgaaatcttttacttacctcttacaaaaaaaaaaaagaaaaaagaaaaaagttcatttcttcattctgtttgtatctagcaaaactgaatgtcaaaagtaccttctgtccacacacaaaatctgcatgtattggttggtggtcctgccccctaaagatcaagccccctacatgagttttacagtataaatactcgtactaccttataaggaagcacttagtggactccttcaagttccatttgctaatgattaacacactgtctgggctggccagtttctcatgcatgcagcttggtgattgagcacagtcaggcctttgtattaaaactgaaaaatggaaaaaacaaattcaaactctcagatggcttctagttcaatctgttcagataaatgtcagcagccagtttaccgcaaacaaacatttaaaattggtttacctcaggatgatgtgcaggaaacgggtgaaggctaaactttgagacacagccctagatgtaggacagtcctcttcaagtgccccaatcccatggtgacagtgacaccctggtggcgagcccgagtgtgatggttcaccgctgtgcacattgcattggagtgaagtgaacaaggctgtcaccaaatcacacacgttttaataagaaatgtttactaagggagcatctttggactctctgttttaaaaccttgtgaaccatgactcggagccagcagagtaggctgtgtctgtggacttgagcacaccatcaacattgctgttcaggaaattataatttacgtccattccaagttgtaaatgctagtcttttattttttttttccaataaaaagaccattaacttaaaagtggtgttaaatggtttgtaaagctgagcttggaagggggacaaggccgttggaggggaggtcagcggacatagaaacacccaacgtccagtacaagctggatttcccgcccaggttctctagcatcaacccctgaaaccagacagattctttgtcatctacgaccatgtaagtctagttattcaaatctgcgcgcatgcgcaaatcatggtgaattgatacttggagtagagccctagtgaaggaaggcctcaagcattcagtaaggatgtcttggctgtgctgctgctgacctgttgaagtacatgaggccatctgtgcaggagacatgatttagtgtgtgtgtaatcctatactcactgtgtatggtgaagcaggccagtcaaagacactacctttgattcagtttaatttatggttatacttaactttagccttttttattatttaagttcactgctttttctccccctaagtagagttaatgcttaacactgtcttgaaagcaaaacaatatcccagaatgaattttgtgtcttaattacgaacctgtaaccaaaacgtacatgtgctggtactggtcccttagcccaaggcactgggctatttaaaaagtcccccttaagaagtgtgttgcatttaaaacaagggccttgtacatttttcagggtgttaactggctgtatctgattaataaggagtgttggcttccaaattcgggggtggcagggagctggcaggcttgtagcaaggcaatgagaagcccttggcaaccacacgggtgcactcggggtaacctacagacccctggttgctccttctcctgctccctgtctttctggcgttttgtagctccttagaattttttttctttctgccaggaggataggtcagagcagtagagaggaagacattgcctgagcgcttctgctcatctttggactgggtggttggcagacaggtcgatgggtggtaaattgacttcagtatcggactcagtaggtattcccttttggtagagaggactgagggctccaggtgtgaagtgaatggccgtggatatgttgtgtaagaggattaagtcgcccagtcgatgacccagtctcaggcttgtggtctgttacctcttggtagtttcaaagggggtcggaggtggctttttaaaaacaatttaccccctatctttaaccatttaccaagtctgtagaagctgggtagacaatattttagcagctccgtagcctgtcctaaaaggttaccttctaaacaggattcttgtgtggccagggatcctgcatgggaactggaaacccctaacccccggggggtgggaagcaggagtttggaactgtaggaggcagagtccccccacctcctcagccttctggcatccaggggcacaagcagcccagggcttggtgttggcagtctgagttcgtgaggtagaaagagtggggtgtcaaggcagtacccctgaagttggatagtactttcctgtaaactgtccctcacttataactactctataaatatatgcatatatttatataaatatatatatataagtgactggttagctggcatcctgctttagcctgagacttgccctaagaaactgctgagcccttggtaaacgtctacacagtaagtttttctgtctgttggggggagctgttgaacaaggcagacatcttgatagttcagatgggctttaatgtactgttgccagggaaggctttttctggttttttgacaaatttttagcacacttcaattggtgtctcgagcaactttaacacattgaagatgaggtattgtacatatttttatattctctttataagtgcatgtctccaacttgtaaccaatattgtacggaatggctgtccagtaggcctagtgtttctgtcacacgagagggatagcatgtaccattcacccctcagcatcctgggagcttcttcttgaatgaagactgtaaatttggtcaagtcaactcttagttcggtttccttaccatttgaatgattgactgtgtgtcctgcgtgtatttctcttttggcagcgaccagagttacactgatgtgtctcaaccgacccactcggctggcaaccacctatttattttct

SEQ ID NO: 1354 - DNA, 5253 bp, Rattus norvegicus
gtccagggaggctcctccgcacgccatgtgcccgtgtccccggcatcgcggccgcgggcccccggccgtgtgcggttgcggcgacgctcgccccgggctgcgctgggcggcggcgcaggtgaccgcgctgcggctgcaggcgctgggcgacgagctgcaccgacgcgccatgaggcgtcgcgcgcggccccgggacccgctgcccgcgctgctgcccgcgctccgcgcccgctggccctggctgtgcgcggccgcgcaggtggcggcgctggcggcctggctgctcggcaggcggagcgcgtaggcggcgcgcgcggggccttcttggtgggggggaccggagccgagacccagcccggaccgagcaacaggttggcgaaaccctgtgtccttggaggaagctggttcctgttttcctgagggagtagcccggagtgcggaaggaagccaagagtgtacagagttgatggtgggaacgcgggcagaggaagcccctcgggaagtccagctgcagagatagccacctcagtgctatttacatagagctatatatatacaaaacaggagaaaaatacaaaattccgtatctgtgcatgcctgcgggggacgtggtccctttcctttccacgcaaccttgcgatgtgaactctgagactttgtgatgtctagggtggcaggggagagagatgcttgctgctgcgcgtgcagggaacttacgtggacctgtgggatcggcctcagtgtggaccaactgctcagcacagatgctggtgtggagtagagggaactcagcggccgaaggcaagatggacaagacagaggggacgtggggcccgttttgttgggggcagcctgggatccctccatttcttgacatgtcctagcctctcactgtccccgttgagtcagctctctagatctcatggcggtcatagccagagaaacgggatgtcattttctttccctacctacaagtgtgtctggtgcttctcttcacagtttcttggtgctaagtgtatccttcttggtacagacagagtcttacagacagaccgggaaggccaggggatgagacgtttctattttgctctttggatagactctcgttgcttttttaaaaaagggccaggtgacaagattgccactggaaagtctctctctggggggaggggtggtgctcacagggcttaagagcagcccctcccccagggggcagggctacgaaggggaggggcgggccttatacaggagctgctttggaggtggcagtccctcctctccctgcagcagcactctgggagactgctgtggactcctccaatttcctaaggggattcagggcttaggtttttgtagattcaagagccaagaaatagctgcgttctgacggagcgtgatttctaagcaggggatgtggggggaggggggcggaccgtttaaatgaaatgtccgatttcccctgctccccaaacacacggaataagctactgttttcagaagtttctagaagggctaatataaatataaatatatatacacaaatataacgaagctgagcgctagactgacatttggctgcagtggctcacggcttcaggactggtggctttttttttttttttttaaaggaacaggtattactcctctgcatggatactgtatcacacccccccccccccaggtctttgtagccgagatggtgagggatgcttgcttgggctcagtgagacagttactcttgtttttattttatctttttttttcctttctaattttggagacaaggcctcaccctggagcccaggctgacctcagctcatgagcctccctgccctgtatctggcatttgggactctgactaccaggggagcgtcattttctcctggctggatttgcaggtgacttgcctagtacctgggggatcagggtttctgctagaaagcatcggttgttcaggtgcgcagggcttcaagggaaccggtccctggccaacattgctgagtgtgatcagtaaaatgcaccctttcccagtttgtagtcaacaggctcctctctccattttaaatccatgccttatatttctctgaataacccacttaaaaaaaaaaaaacaaaaaaacaaaaaaacacaaccgggaactcaatgctgaagcctcccccttttatctgccagaaccgaagtcagcaaagaaaactaaataaaaggagagagcctgtctggcaggggaagcagcaggcagcaggccatgccctcgcccagccagaattacacagaatgatctggaagacaccctctgcttgtgttgagtccctttcccagcaaggaaacaagtccttgcaagcatcacatttcaacatggtgggactctgtggtgtcagcctctttaaagacacacggtccagatcacagcggggggcgcgctgaccctggagagacccagcgcaaagggtgaggggtgagagaaaacctctctttctgtgttttgctttctgagcctggctttgcctgttagctagtgatagctccctggaggatttgaactccaaacacaggggttagcctctctggtcattttcatttcaatgaagctgtgttgccgagagagccgggcaccctgtgaccttcctaatggaacttctcagccaagtcctctgtaaatactctcccgtagtaatggaaaccacgtatttgtcgaatctgggccttggctcgcacgctgttcatttgagtgtgcttctcctgccccgggtttgatggggttgttttttaaatgcctgttttttctatgagatctgacttcttgatggacatttgtattagaatattgaagcatgctggctgtgtcactgttgtctcactgtctctgccgtggtgttacttggactgcatgagataatgggacagcctttctgttattggtgttattgaaaaaaaaaaaaacaaaaaaaacccaacccaacttccacagtgtgtgaagctctggcacaatctccctctctttatcctgctctccctggctgccaaggagcattgattttgattcgcttctatgtagagtctgtgaagagggagagaggctttgaaataaattttaaaaagacctcatactgggtttcagcagacagcagtgggtatgtgtgtgtgtgttcgtgcatgtgagtgtgtgtgcatccatccgactgggaggcctctgagatcattgctaaggagctggttgtgtgaggagctgaggcgccacccgggtctaaaagctgctggctgctctctgagggggagtcctgggagtctgtgggactgaagccttctagagtaggtccactcccttctggaagcttctctccctcacttcatcccccacaagcaagagctctgcccacatttggggttcaatttccctttgtctagatggagtttgagccagagttcttttggagagcccaggaaggactgtgcccactgtccacagtcctgggctgggaggccatgcccccccattccctgtccctctccacaccccatttacagttaccctggagactgcctccccacttctgtgatagccttgttctgtttcctttctaccttgatgggggatactgactgaagcctagtgtcacaggataacgaggccttgaatggcctgatgatactctttagatctgagctcatgtcctgtatgccacctgactgtactgtcatgtttctaaaattgacaaagtgtcattcttgctcactgagaactgggggagggggcagatccacgcatgagctccccaggtatctctgggagaccctgggtcactattggggacgacggcttgtttttgttattactattattgttttctgagacacggagccaggctggccttgaactctctatacagcagaggatagccctgaactcctcatcctcctgcctccacctcctgattactggaatgggccgattactggcttttgttgtggactttttggatgtccaccgtggactgttagaacacaagtctctcccgggttcatgctgttttcttttctgagcctgaagtcaacttggggagagcagggggtcagaaggtgctggggattcggggagaggggccgcagcctatttccacaggagctggtccgaagccccaccaagagggaaagcgtacatcacagtgtctcttgaaagctttagccaaaagtttatctttttgacattttaatgtattcactcgatgcttatttactgaacatctaccgtgtaccagctgaagacctccacgtctgagcaaagtgacttagttatggtacagcaacagtcctttttggagaccagatgccgtgaaatgtccctttccagtctggctcataatttagaacagatctgccgggtcaccattgtgaccccaagccttgctggcagattgctatatagtattttctgcatgccactctctgggctgaatgcaattaaaaattttgctacgttgtctccttctccactgagaggattggtcccttttgtacaataatcaacaccccccacacacacacacacaggagcacggccactgaacactgcaggaggcgcttcccaaggcttcccctgagagagccccatcctattggttagtaccactgatcccattttacaggcgaggaagctgagggcacccaaatggcaaactaagggttgcatttgagttcgtgccccccccccacaagccaatgtggtgcctgctctggtgtcacccatttgaaaagcaagcattatgggtgaaggcaagatattctaggtcaaaggcagacattgctagtctaagggcagggacaaacctgtggcccagcagggagtgtctactttagctgaaaagaaagcaagccttatttggggacacttgagagcagaaggttgtctccagttttagaaacctccagggtaaggggtatctaatgtgcaaacggactgtcccaaccattctggaggccctggggagtctcccacccctctctcctctatctcctctcccaaccctggatccccaaggtctttgcactggaagagtcaaggagccggtatggatggcagaggtggctgtgagggcatttggagactgggggagaggcagtaacttggggggacattctgtctgggtcctgacccttgttgccttgtgctcttttgtaaggggtggggggctccctgcctggatgctttgtacatatttgttacacttttattaaaaaattgatcgtgcacctct

SEQ ID NO: 1355 - DNA, 3219 bp, Rattus norvegicus
ccgaccatgtctcacttagtcgagccgccgccgcccctgcacaacaacaacaacaactgcgaggaaggggagcagtccctgccgccgcccgctggcctcaacagttcctgggtggagctacccatgaacagcagcaatggcaacggtaatggaaatgggaagaatgggggcctggagcacgttccttcctcgtcttccatccacaatggagacatggagaagatccttctggatgcgcagcatgagtcgggacagagcagctcaagaggcagttctcactgtgacagcccttcaccacaagaagacgggcaaataatgtttgatgttgagatgcacaccagcagggaccacagctctcagtcagaagaagaagttgtagatggagaaaaagaagttgaggctttgaagaaaagtgcagactgggtatcagactggtccagtagacccgaaaacatcccacccaaagagttccatttcagacaccctaagcgtgcagcctctctaagcatgaggaagagtggagccatgaagaaagggggcattttctctgcagagttcctgaaggtcttcatcccatctctcttcctctctcacgtgttggctttggggctgggcatctatatcggaaaacgactgagcacaccttctgccagcacctactgagggagacgaaaagcccctgggaatccgtgtggcctgtgaagtggtgtattgtagtttgaatttgagacctattgtaagcatgatccccacctacaaccctatttttacatgcccaattccaagtaactctcaaatccagtattttactcaaactctgttggggcattttactaaccttgttccctttttggcctgtaaaacactttagagattcctaacagagtttactgttgtttagaaatttgcaagggcttttttcagcaacgccaccagcagattataatcttgtcaacagtgcatcgtctcctcttagtaccactagtcacacctgcatcattcatgctagaagctgtgttctagccatgcaattacatctctttctaaatgaggtcaggtttgcaaataatactatgaaagctttgtttagtctttgttttgttttccaggacaaaaacaagcttccctgagcttgagtttataaaatgaaaacaaaccaaaaaaaggaaaaaaaaaaaaaaaaaaaaaaaaaaaaaaagaaggcaaaacacaagcaaaaaaaaaatcctgggcaataaaaattactttaaagcagctctggagcccctctttcctcatcctcctgccgccctgaatgggtaggagacagctgtgtgagggacagacaggagagaggagaggagagcatgctcgcaggtttaacatcagtatattgcaatgctgtcttttctatggtagagaatctttatttgtaaggagtgtctcaggcctagacatacatgaaacttacttttgagattttcatgcgtttggtattttcatgtgttaactgcatgtgaatttttcatgactttctttgtttttctagtttctttttttctaagaagagacttggaacgagtctgattcatggtgttaatagaggcttcttgttttaggaagctttgcttacactctggagcctttacactctgaagaataacttcagagttattccaagtacttgtgtaacttggaaaagtagacttgggttgtgggaacagttgataaagttctggaaagatgccattcactctctttgggtccttacttcctgttgttgcctacagtcttcccaaggtctccttagtctctcccaggcccctgtgactgtcttacgtaagtgtcttctcagttctgtcaaattcctgatgctctatagcactcagaaaattctttgaatggcagactttcttctgtctgtttctaaaatgtgaagctttaggaccaaattgctagtatcaggattgcagattatctcaagtagattttgttagatttcagagcacagcatcactctgagggaatctgtgtcttatatataaataattactgttaatgatgtacactttgctgaagttatagaaccattgtgaatttcaaggctagcaacctacacggtgcaccaggttgacttgaataaatttggcaaccaggtttgccagcatgcagaaactcactcttctctcacataaagggttataaaattggtgtgttatatggaaatggaaaggaaggtagataagacatttctgtcatttttcaagaacatggctgtttatctttaaggcagataatatatccaaaatagttttgtgagttattttctttctggcatttaatgtctacctgatttgagggcaacttctgcccttttcctttcttgctcttaaacctggtgatgcttgatctgccttctcacctattacttcaagtgtttataattgagtttcttaggaagaaagcaaatctggtggcctgttgttttgttgttgtttttcaaattgtcaggactgctgaggctaacctgcagcacagtttgcagcactgacgtgtgagcagagcagaatcactctttaatgctcttataggcggacatcacctctctaaattcagtagcagtttcatcggcagtgccattgaactgtgggaacatttatgattttgtctcaaccttaaaactaaatttagttttgccagtttttgaaagtatcaataaaatcatggaatatgtcccagagcaactgtccatcagtgagcatgtacgatgtcgatttgcggttccaacatacaggatgttcatgctcctacacagattcttgttgagtgaaaacagattgccctatcacaaagcaggattcaacagagttgaaatttaagataaggtttaaaaagctttattcctgtttacaatttgggatgaaaagcaggcttcgttctaagtttattgaaacctggctcagatgtttgtaggtcaagagaaaagcggcacagagacagcacagtgagtcactcaattgcagtaaagagtgaaatggagacagcccgtgagacgaatctcacagtgaagcgtttgttggacctcctggtattaatggagccagagtgacatgcatccttcgtctgtctcttcgtcagcactggcgtcattcctttcagtttaaagaacacatgtaacttgtagctataaacattttgtgccattaaagctctcacaaaacttaaaaaaaaaaaaaaaaa

SEQ ID NO: 1356 - DNA, 1659 bp, Rattus norvegicus
gctgagatccacaaactatgttttcaagcttgcaggcccatttcgacgtgatgctgtatcatcactaacctgaatattggagtgtgttctcccaggcggcggagttctgcctagcatctcctaccaggaccgcttagtaatagatgtctgcaggctcagcttctagtccattgcatactttccagatctctgtgttttagcagccggcattgcatcctcgggcagcatgaaagctggtcagcagggaagaagttgcggtttgatttctccgtatcttgcacccaagaatcagagtgagaggtttgctttcattgcagagtggtatgacccaaatgcttcactgctccgacgctatgagcttctgtactacccggtagatggatctgttgaaatgcatgatgtcaagaatcgtcgcaccttcttaaagcggaccaagtatgaggacctgcgcgtggaagatttatttataggcaacaaagtcaatgtgttttctcgacagctggtgctgattgactatggggaccagtacacagcccgccagctgggcagcaggaaagagaaaactttagccctcatcaaaccggatgcagtatcgaaggctggagaaatcattgagatgataaacaaaagtgggttcactataaccaaactccgaatgatgacgctgtcaaggaaagaagcagcagactttcatgtagaccaccactcaaggcctttttataacgaactgatccagtttatcacaagtgggcctgttattgccatggagatcttgagagatgatgccatatgtgagtggaaaaggttgcttggacccgcaaactctgggatagcgcgttcagaagcccccggaagcgtccgagccctctttgggacagatggcataagaaatgcggctcacggctctgatacttttgagtccgctgccagagaaatggaattatttttcccctccagtggaggctgtggcccaacaaacactgctaaatttaccaattgtacctgctgcattatcaagccccatgctatcagtgaaggaatgttgggaaagattttaatagctattcgagatgcatgctttgagatctcagcaatacagatgttcaatatggatcgagctaatgttgaagaattctatgaagtctataaaggtgtactgtccgattataatgacatggtgacagagctgtactccggcccttgcgtagcaatagagatccagcagagcaatcctacgaagacgttccgagaattctgtggaccttccgatcctgaaatcgccaggcatttacgacctgagaccctcagggcaaattttggtaaaaccaaggttcaaaatgctgttcattgtacagatctgccagaggatgggctcctggaggtccagtatttcttcaagatcttggataattagccgtacagagtaaagacaacacagacggagacgctcagacaagtgagtcacacacgtgaagaatgtgttcattcttttattgtccattgtgttaacctgactgacacaagaccaacaagagcactgtactcctggcaatcattacatatgctagaacatggatttgcactgtagacaacatttaacaccagtctatggggtactgcattgctttttataaagttcaaaataaagattttattttc

SEQ ID NO: 1357 - DNA, 3313 bp, Rattus norvegicus
cccgaggctccgctgttgctgcagctccgcggactcacggagatcgcgccggctctctgggaaactggagctggccaggactgtcgcttcgaagggaacgggccctcttcgtccttcgctggagccgcactggagccaccaaatgcgcctgggtgtgcagcaggcagaaagcaaggactaggcacctctagcccgtgggtgatccgaaggcctgcgcagggtgttcgagaccagtcttgactgagttctgggcatctccagcctctgggccctggagtagagtcagccctcctgcagtttctggagcaaccacaaatccaatttgggatttttgttttcttcttgagcaaaccagagcctaaagattgttgctctgatgctggatttaattcgtatatattttgagcgagttgggcctgtcctcattgttttttgatctccgttttcgcgacagttctgcacacctgtattccaattcttgtcgctttggtctgccgcgcccgcgtgggctccttgacttgcaaataaaggggagcacaccgaagctcagagcttggggcgatgtaccaaagcctggctatggccgccaaccacgggcccccgccgggcgcctacgaagcgggtggacctggcgccttcatgcacagtgcgggcgccgcgtcctcgcccgtctacgtgcccactccgcgggtgccgtcctctgtgctgggcctgtcctacctgcagggcggaggcagtggtgctgcttctggagccacctcgggtggcagctccggggccggcccgtcgggtgctgggcctgggacccagcagggtagcccgggctggagccaggctggagctgagggagccgcttacaccccaccgcctgtgtccccgcgcttctccttcccggggactactgggtccctggcggccgccgccgccgctgccgcagcccgggaagctgcagcctacagcagtagcggcggggcagccggcgctggcctggctggccgagagcagtacgggcgtccgggcttcgcaggctcctactccagcccctacccagcctacatggccgatgtgggcgcatcctgggccgcagccgctgccgcctccgccggccccttcgacagcccagtcctgcacagcctacctggccgggccaaccctgcgagacaccccaatctcgatatgtttgatgacttctcagaaggcagagagtgtgtcaactgcggggccatgtccaccccactctggaggcgagatgggacaggacactacctatgcaacgcctgtggcctctaccacaagatgaatggtatcaaccggcccctcatcaagcctcagcgccggctgtctgcctcccgccgggtaggcctctcctgtgccaactgccagactaccaccaccacactgtggcgccgtaacgctgagggcgagcctgtttgcaatgcctgcggcctctacatgaagctccatggggttcccaggcctcttgcaatgcggaaggaggggattcaaaccagaaaacggaagcccaagaatctgaataaatctaagacaccagcaggtcctcctggcgagagcctccctccctccagtggtgcctccagcaactccagcaacgccaccagcagcagcagcagcagtgaagagatgcgccccatcaagacagagcccgggctgtcatctcactatgggcacagcagctccatgtcccagacattcagtactgtgtccggccatgggtcctccatccatccagtgctgtcggctctgaagctctccccacaaggctatccatctcctgtcactcagacatcacaggccagctccaagcaggactcttggaacagcctggtcctggctgacagtcatggggacataatcaccgcgtaatcagcacccccttccctcttcaaattcctgctcggacttgggacctggggccagcaaagtaaaaggctggggcaccctggccagcccctctgtgtgggaacaactcctgaagaacaactggtagaacttgaagttgttgacaatcacttagggataagggtgctgggtttcttcaaatacctttccaggtggagcactggaagaagcctgcattctcacagaaaagcccaccttggctgcaagcacagcacagtgaggctcttcagtgagcaggagacttcttcctccttctctacctgcctgtccaggacagacacataatcttcaccccagctccccaccccagtggctgtggtgatgggtttttctttgtgatcctagagtggctgtagggaccgaggcttcaagacactgtctacagccggcgcagggtgtctacttgtggactagacatagcagccctgcccttgtccaacactccccttgaggcatggaacatctcatgtgtcccatacctgatctgactccaaagcgctgggtgcagtgcagatgttactgagtgcttcctggggggtttaggtgaggagaaggcacatcacccatcacacagatcgcagcccgtcagaggtgccttcccttcctctcccaggaacagcaacccccttgctctccagcctgaacatctcctaccctctgtaaaactagagcccagttgtacagcaggctaataccactaggtgctgttcccagcatccatttccacctcttcacacacaggggttccaaggaggaacaaaacctgctactaaagcagggttggtgactgtgctcatctgcaccttgggaccctctggaggttgtgtctacagcacaatcctgcccccaggactccagcttacttgctctgagcctgccaagccaagctctctcaagtcagacagttaactggctctgggactttctccagcacagatcctttgtctagaaaatacggactgtttgcaaaacaaattcagagcagaaacaacaaagggaaatttttgaaaggacaagggtgatggatggaagaagatgtccccaggcctgatgggacagccatgcttgcagttgtgctagaactggcaacccctctccctcctccattactggggctcccaaagattcttccttgtcttcatcacccacagagctgtagccaactgtggcattaccttgttttgccccaaatttccagccccgcccctaaaccttactggccgtagcagagaatagctttgaaccaagattctgttgtaatcatttacgctgtttctccctcaaggccgccttcctatgcctccccctcctccacaacccgttaacattgtcttaaggtgaaatggctgtaaaatcagtatttaactaataaatttatctgtattactcttaa

SEQ ID NO: 1358 - DNA, 1541 bp, Rattus norvegicus
caccaagcgttggattgttcacccactaatagggaacgtgagcgggcttagaccgtcgtgagacaggttagttttaccctactgatgatgtgttgttgccatggtaatcctgctcagtacgagaggaaccgcagttcagacatttggtgtatgtgcttggctgaggagccaatggggcgaagctaccatctgtgggattatgactgaacgcctctaagtcagaatcccgcccaggcggaacgatacggcagcgcgaaggagcctcggttggccccggatagccggctccccgtccgtccccgtcggcgggtccccgcctcgtcgcccccccgggtgcggggcgggtccccccgccgggcgtcgggaccggggtccggtgcggagagccattcgtcccgggaaacggggtgcggccggaaagggggccgccctctcgcccgtcacgcttaacgcacgttcgtgtggaacctagcgctaaaccattcgtagacgaccttcagcaaggcctagccaggcgtggctcccggcctttccacccggactctgcgcgtgcgcccgcccagctgccggcggccgcggtgtccgctgcagccaaccaccagggtgtagcgctgatgcatgggcagcaaagcgggccacgatgacagattacggcgaggaacaacgcaacgagttggaggctctggagtccatctaccccgactccttcacagtgttatcagaaaacccacccagcttcaccattactgtgacatcggaggctggagaaaatgatgaaactgtccagactactctcaagtttacatacagtgaaaaataccccgacgaggctcccctttatgaaatattctcccaggaaaatctggaagataatgatgtctcagacattttaaaattactagctttgcaggccgaggagaatcttggcatggtcatgatcttcactctcgtgacagctgttcaagaaaagttaaatgaaatagttgatcagataaaaacaagaagagaggaagaaaagaagcagaaagaaaaggaagcagaagaagcagagaagaaactgtttcatggcacccctgttacaattgagaatttcttgagttggaaggccaaatttgacgcagaactcctggaaattaaaaagaaacgaatgaaagaagaagaacaagcagggaaaaataaactaagtgggaaacagttatttgaaacagatcataatcttgacacatctgatatccaattcctggaggatgctgggaacaatgtggaggtggatgagtcattgttccaagaaatggatgatttggagctagaagatggtgaggatgatcctgactacaatcctgttgccccagggagtgactcctcagactgatggactgtccctgtctccagagaggcgtgactgccacagcatctgtggctatgctgagagggtttggatctacctttcatttttttctaagaaaaaacaaatttttcaggagaatattcttctgatagctttcatcattgaacttaataaactgcccataaaatttcca

SEQ ID NO: 1359 - DNA, 3751 bp, Rattus norvegicus; identical to SEQ ID NO: 1079

SEQ ID NO: 1360 - DNA, 2795 bp, Rattus norvegicus
agttgcttcagtgtcccggtgcggttagtcacgtttcgtgcgtgctcattctgccaagatgcctgaggaaacccagacccaagaccaaccaatggaggaagaggaggtcgaaacctttgcctttcaggcagaaattgcccagttaatgtccttgatcatcaacactttctactcgaacaaagagatctttctgagggagctcatttccaactcctcagacgctctggataagatcagatacgagagcttgaccgaccctagtaaactggactcggggaaggagctgcacattaatctcattcccaacaagcaagaccgaaccctcactattgtggatactggcattggaatgaccaaggctgacttgatcaataaccttggcactattgccaagtcaggcaccaaagccttcatggaggctttgcaggctggtgcagatatctctatgattggccagtttggtgttggtttttactctgcgtatttggttgctgagaaagtgactgtcatcaccaagcataatgatgacgagcagtacgcctgggagtcctcagctggaggatccttcactgtgaggacagacacaggtgaaccaatgggtcgtggaacaaaggttatcttgcatctaaaagaagaccaaactgagtatttggaggaaaggagaataaaagaaattgtgaagaaacattctcagtttattggctaccccattactctctttgtggagaaggaacgtgacaaggaagtcagtgatgatgaggctgaagaaaaggaagagaaagaggaagagaaagaaaaagaagaaaaggagtctgatgacaagcctgaaatagaagatgttggttctgatgaagaagaagaagagaagaaggatggtgacaagaagaaaaagaagaagataaaggaaaagtacattgatcaagaagaactcaacaaaacaaagccgatctggaccagaaatcctgatgacattacgaatgaagaatacggagagttctacaagagcttaaccaacgactgggaagaacatttggcagtaaagcatttttctgttgaaggacaattagaattccgggctcttctttttgtcccaagacgcgctccttttgatctatttgaaaacagaaagaaaaagaacaacatcaagttgtatgttcgcagagtttttatcatggataactgtgaggagttaatccccgagtatctgaatttcatcagaggggtggtggattctgaggatctccctctaaatatttcccgtgaaatgctgcaacaaagcaaaattctgaaagttatcaggaagaatttggtcaagaaatgcctagaactatttactgaactggctgaagataaagagaactacaaaaagttttatgagcagttctcaaaaaatataaagcttggaattcatgaagactctcaaaatcggaagaagctttcagagctgttgagatactacacatctgcttctggggatgagatggtttctctgaaggactactgcaccagaatgaaggaaaaccagaagcacatctattttatcacaggtgagaccaaggaccaggttgctaactcagcctttgtggaacgtctccgaaagcatggcttagaagtaatctatatgattgagcccattgatgagtattgtgtgcaacagctgaaggaatttgagggcaagaccttggtgtcagttaccaaagaaggactggaacttccagaagatgaagaggaaaagaagaaacaggaagagaaaaagacaaaatttgagaacctctgcaaaattatgaaggatattttagagaaaaaggttgaaaaggtggttgtgtcaaaccgattggtgacatccccatgctgtattgtcacaagcacatatggctggacagcaaacatggagagaatcatgaaagctcaagccctcagagacaactcaacaatgggttacatggcagcaaagaaacacctggagataaaccctgatcactccattattgaaaccttaaggcaaaaggcagaggctgacaagaatgacaagtctgtgaaagatctggtcatcttgctgtacgaaacagcactcctgtcttccggcttcagtctggaagatccccagacccatgctaacaggatctacaggatgatcaagcttggtctaggtattgatgaggatgatcctactgtggatgataccagtgctgctgtaactgaagaaatgccacccctggaaggagatgatgacacatcacgcatggaagaagtagactaggcttcaccagaactatgtgtttgatgcttaccttcattccttctgataatatattttccatgatttttgtttatttttgttaacatttaaaacatctgtgtggcatgaaaactaggggaaggtaaaaatttctacatgtgatactgtgatactataggtttgactcaagaggttgatagaacgtttgttgtaagacgtaatgtaacctactgttactgttaactatgtggtctgaagtgtttagctgttgagctggattcctttagtagaccaaattaagatgacttaagtttcatcttaaatttttttcattccctgtagttaattctgcatgtactagtcttagaagtaaacacaagctaaaacaacttgacaggaattccccaagtggcttgttttccaaagtactgagaacaaaaccctaagttcccctaggtcttgtaactcagcaaggcttgtgaatgtgaaaataacagtgcccaatcacattctgctttaaaaaggtaaatacagatgagataaaaaaaaaaaaaaa

SEQ ID NO: 1361 - DNA, 4632 bp, Rattus norvegicus
ccacgcgtccgcgccgtcgcccgcgccaccaccccttagtctctgctggaggatcgtgaccgccattccccgcttttttttttctttttataatctcttgaataattaaatctaagaaagaaaaaaaatccatctcttgtgcctgttggattgcggggattttcttttttttttaatttaaaaaagaaaggaaaaaaaggggggggggactccgaccacacttatttttgcctcgttttacaattctggtgtgaccgagacagcccgcgggagacgctgccgtgaggtgggccagctcgcaggaagagcaccgaggcagcctcgagggccagtgcgccgccaaggacaaaaggaagctcgcgccgcgcgctgaacaccgttcctccggatcagcatgaagaagaccgaaatgggaaggttcaacatctccccggatgaggacagcagcagttacagctccaacggtgacttcaactactcataccccacgaagcaggctgctctaaaaagccattatgtggacgtggaccccgaaaaccagaactttttacttgaatcgaatctggggaagaagaagtacgaaacagactttcatccaagtactacttcctttggaatgtcagtatttaatctgaccaatgcgattgtgggcaatggaatccttgggctttcttatgccatggctaatactggaattgctctttttataattctcttgacgttcgtgtcgattttttctctgtactccgttcacctcctcctcaagactgccaacgaaggagggtctttattatacgaacagttgggacataaggcatacggtctggctgggaagctggcagcctccggatcgattacaatgcagaacatcggagctatgtcaagctacctcttcatagtgaaatatgagttacctttggtgatcaaggcgttaatgaacattgaagatacgaatgggctgtggtatctgaacggcgactatctggtccttctggtgtccttcgtgctcattctcccattgtcactgctgagaaatctaggatacttggggtataccagcggcctttctctgctctgtatgatattctttctgattgtggtgatttgcaagaagtttcagattccttgccctgtggaagtggctttgatggctaacgaaacggtgaatggcacctttacccaggtggctttggcagcgctggcgtccaacagcaccgcagccgatacctgcaggccccgttactttatcttcaactcacagactgtgtatgctgtgcccatcctgacgttttcctttgtctgccatcccgctgtccttcccatctatgaagagctgaagagccgcagccggagaaggatgatgaacgtgtccaagatttctttcttcgccatgtttctgatgtatttgcttgccgccctcttcggatacctgacattttacgagcacgtggagtcagaactgctacatacctactctgcgatcgtgggaactgacattctcctcctcgttgtccgcctggctgtgctggtggctgtcaccctcactgtccccgtcgtcattttcccaatccggagttcggtcactcacttactgtgccctacaaaagagttcagttggttccggcacagtgtcattactgtgacgatcctggccttcaccaatttgctcgtcatctttgtccccactatcagggacatcttcgggttcattggtgcatcggccgctgcaatgctgatcttcatccttccgtctgctttctacatcaagttagtgaagaaagaacccatgagatccgtgcaaaagattggggctctgtgttttctcctgagtggcgtagtcgtgatgattggaagcatgggcttgattgtcctggactgggtccacgatgcctctgcaggcggacattaaccgccccactcaaactgaacggtccatctgcctgccgcgttgggtccactcaactcgctcagacttcacccgatgctttcgggtcacttccttctgaagtgcagcctcctcgctggttcttctggatgcagaataagtgaacttttctttctctttggttttttttttaaaagaagcttatctgtgtgttagggaatggatattaacaccaaaaaccacgagccttgggttaagggaagtgacagtttattccattccagagaatggacggacttttatcaaagccacatgtctggctgtctcattgtttaacttggatattttatgattttacttgaatgtgcctaacggaaccattcgatgtgagaaacacttcttaatttacagcaaagtattgaaataagcattgagaaaaacacttattttttgtaccaaaaaaatactttaaaagacctcagaagcactattttactttgaagaaattgcattttttgaactttatccagaaccagttgtcaataaactccgtaaaacaatttcattgatatttaaaaatgaatattagtattatgaaattatttgccttttttataggcattataagccaaatacttttttaccccaaaatcattttcgggaaaatgttacgcaaagttgcaccatgagttagcatggttttgttttgctcatttcagattcatttgaaggataattggtaattgctgcaccaaatccggtgagcctccctccgttcatcgctgtctttgccttcagataattggttcattaaaactaaaatgtttgtgtcttcaattaggctgggaaacactgtaggaaatgaaataactgattttgaggtaccaaatagtgcaattgggtaaaacagggtttattcagttgcgtctgtccccagagttctactgtcaactctgggtcgtgcttttgggcccatcctttaaaacatcgcttccaaaagtgaaaatgggcgtttgatggcccgcaggccaaagctgtccaatagaaagcagtagaactttcaaacgctcgcctactggaagcgtgatttacttgacaacacgcggctcagttgtgttcctgctgtgtctacagtagaggtctagacggcaggctgcaccgtgctgtacactgcaagctctcttcagaaaggtcactgggtttctcatgcagtaagctttctaagaactcgcactggatcgtcatctcattgtacgatgcagaattgcttgtttacatggaacgagtgatcagttagggaagcagtacgagcgattgtacccagttctggtccagctgcatgcttagctttccacttcagctccagttacaagtggaagcatttctttgaggcttggctttaagagcacatttactgtatgttaacggtgtatggtgaatatattattaaataatgtggtacttgcccatcaggcataatgtctaagatctaatatacataattccattaagcggtggagggaagcaagtggaatcgtcatctggctcctgaggtttttctcttgaactaaacttttttttttggttcgaggcaagggccagaacaaatgtgacacacatggtttttgttacagtcttgtattgtatatgtgactaaattcataggcaagatgtgtctgctactaaagacccttgcagacgggaagacgtctggtagtgctacgttgggtacaaccaatggtcagttctgtcccgaagatgaaattgctggggatcatgtagacgcaaaggcagtgagaagaagacactccaccctgctgcttttcagtccttcaagtccagaacctcacctttagtcaaaagacttggcacttctgctcgaagtcctaaaaagagtcgccgctaaggtctgccaggggagctgaggaacaggcatccaagaaaaggtgccatggcaaccaggatcctcctcacagccgatcagtgtggagagagcacaactgaaggttcacaatgaatttcaggccaaattccaacgcttggggctctgtcagccttgaggttcctaaaccgagttctcagtcttgagcagtcttcagtattaaaaccactgtcccgtcacctcggtttgcattactgtcttccacggaacgtttcaataactgtactgttatttatagagcagcattaatccattaaagctaacctatttttcaatatttatggtaaactgtacatacattgtccatatgtatttgtaaataagctgtatatactgttggaattgggtcttgggttcaagtgtatatattccccctaaattttcttaactgcattttgatgaattcacattatatataggtccccggattacttgtacagaggattcaatattgacattgtgtataatactaaaattgaaaataacttgtttaaattgtatttgcaataaactggttggtcatcaacacaagttcagatatcaaactaaaagctttaaatgaggtgtctaaattttcaaaatgcagtaggtacaacacggctatctggtaacttgtcatgtgatttcaatggaagtcacgtggactccttgtatgtatatagtgtaaatgcccccgctgtactgtagaggctgacaggccactgtggcttgttggcagggagtgctatgccagtttcaatgaaacaatgtatgtttgttttaactgaactaaaataaacacttaatcctgaaaaaaaaaaaaaaa

SEQ ID NO: 1362 - DNA, 4801 bp, Rattus norvegicus
ctgcagaagccaagccctgccccacccctgcccctgcctcctgtcctcttgtggtgccaaagctccctgaagcagaaaaacttcttatattcagtctaacagacctatctctcttaagggcaaagcgactcagctcctccctgtccccctgtgtgaaagaaagagcagtagccctcttctcccagcagctctgcccactcacagatctgcctgccgtcctcctctttcctcccctggaccttggctcaaggaccaggtatgaaggatcccccaagtccttcaggcctgaagtaagagtcaacccagccttaagtcatctcccatccaagaactgggtctaaaacgttccccatttctaaccttcaagacagacctgatgttaaatccttccctggaaggaagggtgctttcccccttcccaggggtgctcatccctcaccctggggagaccatgttggtgaggtagggggagaatgttttctgaaggccagttcctctcccctcctccagctcaaaacaatctcaccgtcctcctgccatcccatttgggacaagatgacaggatggcactcactttggagacctcagaaaagccccttccaggagagctgctggtctgtgctgtacaggaagggtgacagcatctgccttctcctggcagcctccacacctgctgtgcttaggacaggatcctttgatcacaaagcagaaccctaatcctgttccatctactcaaactggaacacccaggggccttttcctggtctcccaacttcccacctagctcaccctacccctaactggtgagaggctgagtttgggctgaattgtggcccttcagaatacagtccaggcaggctgtggggcctctgggggggccagggaccacccctctacccctttcctcccattccttcagcctgcacctgcccctccttgaattattgtctctctctctctttttttttttaagtggatgccttactttttggataactatttttgaagctggtatttctatttcttttggattttttaatgtatggtggtttgggggcagagctagaaccttaatcgtctgtcgctgagttcatttaggttttaaattttattggtttgttttatggagtattttcccgctgcgcccttccggccctcgcaaggcttcctgagccggaggctaaaaagctccatcaaacgtacaaagtcacaacccaaacttgaccggaccagcagctttcgacagatcctgcctcgcttccgaagtgctgaccatgaccgggcccggctgatgcagagcttcaaggagtctcactcccatgagtccctgctgagtcccagcagtgctgctgaggccctggagctcaacctggatgaagactccattatcaagccagtacacagctccatcctgggccaggagttctgctttgaggtaacaacatcgtctgggacaaaatgttttgcctgtcggtctgcagccgaaagggacaaatggattgagaatctacagagggctgtgaaacccaacaaggacaacagccgccgggtagataacgtgctgaaactatggatcatagaagctcgagagctgccccccaagaagcgatattactgcgagttatgcctggacgacatgctctatgcacggaccacttccaagccccgctcagcctcaggagacactgtcttttggggcgagcacttcgagtttaacaacctgcctgctgtccgggcgctgcggctgcatctgtaccgtgactcggacaaaaagcggaagaaggacaaggcaggctacgttggcctggtgactgttccagtggccaccctggctgggcgccacttcacagagcagtggtaccccgtgaccctgccaacaggaagtgggggctctgggggtatgggctcggggggaggaggggggtcagggggcggctcagggggcaaagggaaaggaggctgtcctgctgtgcggctgaaggcccgttaccagacaatgagtatcctgcccatggagctatataaggagtttgcagaatatgtgaccaaccactaccgcatgctgtgtgccgtgctggagcccgccctcaatgtcaagggcaaggaggaggtcgctagtgcactggttcacatcctgcaaagcacaggcaaggccaaggacttcctttcagacatggccatgtcagaggtagaccggttcatggagcgggaacacctcatattccgcgagaacacgctcgccactaaagccatagaagagtatatgagactgattggccagaaatacctcaaggatgccattggggagttcatccgggctctgtatgaatctgaggagaactgtgaagtagaccccatcaagtgcacagcgtccagtctggcagagcaccaggccaacctgcggatgtgctgtgagttggccctgtgcaaggtggtcaactcccattgcgtgttcccgagggagctgaaggaggtgtttgcatcatggcggctgcgctgtgcagagcggggccgggaggacattgctgacaggctgatcagcgcctcgctcttcctgcgcttcctctgcccggccatcatgtcgcccagtctgtttggactgatgcaggagtacccagatgagcagacctcacgaaccctcaccctcatcgccaaggttatccagaacctggccaacttttccaagtttacctcaaaggaggacttcctgggcttcatgaacgagtttctggagctggagtggggttctatgcagcaattcttgtatgagatatccaacctggacacactgaccaacagcagcagttttgagggctacatagacttgggccgcgagctctccacacttcacgccctgctctgggaggtgctgccccagctcagcaaggaagccctcctgaagctgggcccgctgccccggctcctcagcgacatcagcacagccctgaggaaccctaacatccaaaggcagccgagccgccagagcgagcgcgctcggtctcagcccatggtgctgcgcgggccgtcagccgagatgcagggctacatgatgcgggacctcaacagctccatcgaccttcagtccttcatggctcgaggcctcaacagctctatggacatggctcgcctcccctccccaaccaaggagaaacccccgccgccccctcccggtgggggtaaagacctgttctatgtgagccggccaccactggcccggtcctccccagcatactgcacgagcagctcggacatcacagagccggagcagaagatgctgagtgtcaacaagagtgtgtccatgctggacctgcagggcgacgggcctgggggccgccttaacagcagtagtgtttccaacctggcagctgttggggacctgttgcactcaagccaggcttcactgacagcagccttggggttgcggcctgcacctgccgggcgcctctcccaagggagtggctcttccatcacagcagccggcatgcgcctcagccagatgggtgtcactacggatggtgtccccgcccagcaactgcgcatccctctttccttccagaaccctctcttccatatggctgccgatggaccagggcccccagcaggccatggagggagcagtggccatggtccaccttcctcccatcaccaccaccaccaccatcaccatcaccgagggggagaacccccaggggacacttttgccccgttccatggctatagcaagagcgaggacctctctacaggggtccctaagccccctgcggcctccatccttcacagccacagctacagtgatgagtttggaccctctggtactgattttacccgtcggcagctctcacttcaggacaacctacagcacatgctctccccgccccagatcaccatcggtccccagaggccagctccctcagggccaggagggggcagtggtgggggcagtggtgggggcggtgggggccagccacctcccttgcagaggggcaaatctcagcagttgacagtgagtgctgcccagaaaccccggccgtccagcgggaacctattgcagtccccggaaccaagttatggtcctgcccgtccacggcaacagagcctcagcaaagagggcagcattgggggcagcgggggcagcggtggcggagggggtggggggctcaagccctccatcaccaagcagcattcccagactccatccacgctgaaccccacgatgccggcctcggagcggactgtagcctgggtgtccaatatgcctcacctgtccgctgacatcgagagtgcacacattgagcgggaagagtacaagctgaaggagtactcgaagtccatggacgagagccgactggacagggagtacgaggaggagatccactcactgaaggaaaggctacacatgtccaaccggaagctggaagagtacgagcggaggctgctgtcccaggaagagcagaccagcaagatcctgatgcagtaccaagcccgcctggagcagagcgagaagcgcttgaggcagcagcaggtggagaaggactcccagatcaagagcatcattggcagcccgtcccttcaggctgatgctggtggaggaggagctgcgccgggaccaccccgccatggctgagccgctgcctgaacccaagaagaggctgctcgacgctcaggagaggcagcttccccccttgggtccaacaaacccgcgtgtgacgctggccccaccttggaacggcctggcccccccagccccaccccccccaccccggctgcagatcacagagaacggcgagttccggaacaccgc

SEQ ID NO: 1363 - DNA, 2928 bp, Rattus norvegicus
gaggttctgccaaacgcagttcacttgcaacaatgctgtggacactacctgtgtgtcttctctcactgagtttttctgcccacattgcagctgtgtccattcagcatctttcgactggacatgaccacgatgatgtagacgttggtgaacaacagaaggacatttcagaaatcaactcagctgcaggcctgaacctttttcaaggggacatccttctgcccagaaccagaaatgccctgagagatccgtcaagcagatggaagccccccattccatacattctggctgacaatctggatctgaacgccaaaggagccatcctcaatgcctttgagatgttccgcctcaagtcttgtgtggacttcaagccctatgagggggagagctcgtacatcatcttccagcagttttctgggtgctggtctatggtcggtgatcaacacgtgggacagaatatttccattggtgagggctgcgactataaggccatcattgaacatgagatcctgcatgctctgggattcttccatgagcagtcaaggactgaccgggatgattatgtgaacatctggtggaatgaaattatgacagattatgaacataatttcaacacgtatgatgacaagaccatcacagacctcaacacaccctatgattatgagtccttgatgcactatgggccattttcatttaacaagaatgaaaccatcccgaccatcactaccaagatccctgagttcaacgccatcattggacagcgcctggatttcagtgccactgatttaacgagactgaatcggatgtacaactgcaccagaacacataccctgctggaccactgtgcgtttgagaagaccaacatctgtggaatgatccaggggaccagagatgatgctgactgggttcatgaggacagcagtcagcctggacaagtggatcacaccttggtgggacggtgcaaagctgctggctacttcatgtacttcaataccagctcgggggtgaccggagaggtagcccttctggagtctcggatcctttaccccaagaggaagcagcagtgtttgcagtttttttataagatgacaggaagcccttcagacagactcctcatctgggtgagaagggacgacaacacgggcaacgtgcgccagctggccaagatccagacttttcaaggagattctgatcacaactggaaaattgctcacgtgacactcaacgaagagaagaaatttcgctatgttttccagggtaccaaaggtgaccctggtaactcagatggcggtatttaccttgatgacatcactctgacagaaaccccctgccctacaggggtttggaccatccggaatatctcccaggtccttgagaacacagtgaaaggggacaggctcgtgagccctaggttctacaattccgagggttatggttttggggtgaccttgtaccccaatggtagaatcaccagtaactctggctacctgggactcgctttccacttgtacagtggggataacgatgtgattctggagtggccagtggagaacgagcaggccataatgaccatcctggaccaggaacctgatgccaggaacaggatgtccttgagtttgatgttcactacctccaagtaccaaacatcttcagctataaatggctctgtcatctgggacaggccaaccaaggttggagtctatgataaggactgtgattgttttagaagcattgactggggttggggtcaggccatttcccaccagatgctgatgagaagaaatttccttaaagatgacaccctcatcatcttcgtggactttaaagaccttacccacttgaggcagactgaagtccccatttccagcagaagcgtgataccccgaggactccttctgcaaggccaggagcctcttgccttgggagactccagaatagccatgatggaggaatccctgccaagaaggctggaccagagacagcccagcagaccaaagcgctcagtggaaaatactggtcccatggaggaccacaactggccacagtacttcagagacccatgtgacccaaacccttgccagaatgaaggcacctgtgtgaacgtaaagggaatggccagctgcaggtgcgtctctgggcatgcctttttctacacaggggagcgctgtcaggctatgcatgtgcacggaagcttgctgggcctgctcattggctgcatcactgctttgatcttcttgaccttcatcacattctccaacacttaccaaaagctgaggcagtgagctgatgtccactagactgcagaagggcctccttcacctagactttccttccagtagtcagtataatttggggatattcttcatcaaacatgtttgaaagagcctccaaaaccaaagccccaaacctcatgtggggctcttgccactccatttctgtacagttctgctatccttctatgagtttctggtgaatccattatgtcctaagataacagtcattgcattttactataaacactttgcttgcttgaccttctccccttaaatcaccaagtctagttgggtaggagcatgttatcctctgctaccacattgaccccagtgctagaagcataccttactggtgtattgtgggtactcagtaagcattaaatgaatgaaccaataagcaagtgaatagctgtggtataataagtctttttttcttcctcatattgtaaaacatatgattaagtctatttgcaggtgtatcagaaccaaatacccagtttacactagatgggaaaactactgtcttattgctcatgtagtttcttgtgaaatgatttcacagattcctctggtcagctgagtttccatggcatgtacttttttcttgttctgattttaaggaaaaggcttaataaaaccattaaatatgaaaaaaaaa

SEQ ID NO: 1364 - DNA, 2524 bp, Rattus norvegicus
ggcctaggcttgccgtgcgagtcggacgtggtccgggcccaccctgctctgtactactactcggctttctcgtcaagatgcctgaggaagtgcaccatggagaggaagaggtggagaccttcgcctttcaggcagaaattgcccagctgatgtccctcatcatcaacactttttactcaaacaaagagattttcctccgggagttgatctctaatgcttctgatgccctggacaagattcggtatgagagcctgactgacccttccaagttggacagcgggaaagagctgaagattgacatcatccccaaccctcaggaagccacgctgactttggtggacacaggcattggcatgaccaaggctgacctcataaataacttgggaaccattgctaagtctggtacaaaggcgttcatggaggctctccaggctggtgcagacatctccatgattgggcagtttggtgtcggcttctactctgcctacctggtggcagagaaagtggttgtgatcacgaagcacaacgatgatgagcagtatgcctgggagtcttctgctggtggatccttcactgtccgtgcagaccacggtgagcccattggccggggtaccaaagtgatccttcacctcaaagaagaccagacagagtacttagaggagaggagggtcaaggaggtggtgaagaaacactcacagttcataggctaccccatcaccctctatctggagaaggaacgcgagaaggagatcagtgatgatgaggcagaggaagagaaaggggagaaggaggaggaagataaggaggatgaggagaagcctaagattgaggatgtgggatctgatgaggaggatgacagcggcaaagataagaaaaagaaaacaaagaagatcaaggagaagtacattgaccaggaagagctgaataagacgaagcccatctggaccagaaatcctgatgacatcactcaagaggaatatggtgaattctacaagagcctcaccaatgactgggaagaccacttggcagtcaagcacttctctgtagaagggcagttggaattcagggcattgctcttcattccccggcgagctccctttgacctctttgagaacaagaagaagaagaacaacatcaaattgtatgtccgtcgtgtgttcatcatggacagctgtgatgacctgatacctgagtacctcaacttcatccgtggtgtggttgattccgaggacctgcctctgaacatctcccgagaaatgctccagcagagcaagatcctgaaagtcatccgcaaaaacattgtgaagaagtgccttgagctcttctctgagttggctgaagacaaagagaactacaagaaattttatgaggcattctctaagaatttaaagcttggaatccatgaggattccactaaccgtcgccgcctctctgagctccttcgctaccatacctctcagtctggagatgagatgacttccctgtcagagtatgtgtctcgcatgaaggagacacagaagtccatctactatatcactggtgagagcaaagagcaggtggccaactctgccttcgtggagcgtgtgcggaaacggggctttgaggtggtatacatgactgagcccattgatgagtactgcgtacagcagctcaaggagttcgatggcaagagcctggtctccgtgaccaaggagggcctggagctaccagaggatgaggaagagaagaaaaaaatggaggagagcaaggcaaggtttgagaatctctgcaagctcatgaaggagatcttggacaagaaggttgaaaaagtgactatctccaataggcttgtgtcttccccctgctgcattgtgaccagcacctacggctggacagccaacatggaacggattatgaaggcccaggcactgcgggacaactcgacaatgggctacatgatggccaagaaacacctagagatcaaccctgaccaccccattgtggagactctgcggcagaaggctgaggcagacaaaaacgacaaagctgtcaaagacctggtggtgctgctgtttgagactgctctgtcttctctcgcttctcactttaggaggcccaaaacccactccaaccgcatctaccgcatgattaaactaggcctgggcattgatgaagatgaggtcactgcagaagagcccagtgctgctgttcccgatgagatccccccactggagggtgatgaggatgcctctcgcatggaagaagtggattaaaggctcctgggaagcccccgccctctgtatagtatccctgtggctcccccaacagccttgactggccctgacccacctgggctctctctgctcatgtctacaagaatctcttctatcctgtccttgtgccttaaggcaggaagatcccctcccacagatagcagggttgggtgttgtgtattgtgtttttttgtttgttttattttgttctgaaattaaaagtatgcaaaataaagatgatgcagttttaaaaaaaaaaaaaaaaaaaaagg

SEQ ID NO: 1365 - DNA, 2190 bp, Rattus norvegicus
gctgccagctacaggcagtggggaaatccacagggcagcagctgtattgtagacggcccttgctcactgcctgcctgcagccagctctgtacaaggaacaatggccctgaggacaggaggcccagccctggtggtgcttctggctttctgggtggcactgggcccctgtcacctgcaggggacagatcccggagcgtcggcagatgccgagggcccccagtgccccgtcgcctgtacctgcagccatgatgactacacagatgagctcagcgtcttttgcagttcaaagaacctcacacatctgcctgatgacatcccagtcagcaccagagccctgtggcttgatggcaacaacctctcttctatcccctcagcggccttccagaacctgtccagcctggactttctcaacctgcagggcagctggctgaggagcctggagccacaggcactgctggggctgcagaacctctactatctgcacctggaacggaaccggctccggaacctcgccgtgggcttgttcacacacacaccgagtctggcttcactcagcctgagcagcaacctcttgggccggctggaggaagggctgttccagggcctcagtcacctttgggacctcaacctgggttggaacagtctagtggtcctgcctgacacagtgttccagggactgggcaacctccacgagctggtgctggctggcaacaaactgacttacctgcagcctgcgctcttctgtggcttgggcgagctgcgggagctggatctgagcaggaacgcactccgaagcgtcaaagctaacgtctttgtacatttgcccaggctgcagaagctgtacctggaccggaacctcattacagccgtggcccctggtgcctttctgggcatgaaggccctgcgttggctggacctgtcgcacaaccgcgtggctggcctcatggaggacaccttcccaggcctgctgggcctgcacgtcctgcgcctggcacacaatgcgatcgctagcttgcggccgcgcactttcaaagacctgcacttcctggaggaactgcagctgggccacaatcgaatcaggcagctcggggagaggacattcgagggcctggggcagctggaggtgctgacgctcaatgacaaccagatcactgaggtcagggtgggcgccttctctggccttttcaatgtggcggttatgaatctctccggcaactgtctgaggagcctcccggagcgggtgtttcagggtctggacaaactgcacagcctgcacctagagcacagctgcctgggtcacgtccgcctgcacacttttgctggcctctcagggctgcgcaggctcttcctcagggacaacagcatctccagcatcgaagaacagagcctggcagggctttcggagctcctggaactggatcttactaccaaccgcctcacacatctgccccgccagctcttccagggcctcggccacctggagtacctgcttctctcctacaaccaactgacgactttatccgcggaggtcctgggccctctgcagcgggccttctggttggatatctcacacaaccacctggagacgctggccgaaggccttttctcatctctggggcgcgttcgctacctcagcctcaggaataactccttgcagaccttttcaccacagcccggcctggagcgcctgtggcttgatgccaacccctgggactgcagctgtcccctcaaggcgcttcgagactttgccctgcagaaccctggtgttgtcccccgctttgttcagactgtctgtgagggggacgactgccagccggtgtacacctacaacaatatcacttgcgctggccccgccaacgtctcgggcctcgacctaagagacgttagtgaaacacattttgtgcactgctgacactggctacttactggcccggtctggccgaacactgtctcatggccaggacggtgtctcattgttaacagaataagctggctctcaaattcctacccatctctaggggacaggtcctggctgctcacttcctggaagcaggctgtactggaagctatgtggcctagaaagggtgggctcaggccaagtgtccaagggcccaaaggagggaggtgctcgctgaatttaagcatattagtcagcggaggaaaagaaactaaccaggattccctcagtaa

SEQ ID NO: 1366 - DNA, 954 bp, Rattus norvegicus
ccggaatacctttcctcacaggattctattcaaaagatctcatcatcgaagccatcaacacgtgtaacaccaacgcctgagccctaataatcactttaatcgccacatccataactgctgtgtacagcatacgcatcatctacttcgtcaccatgacaaaaccacgatactccccactaattactattaatgaaaacaacccaaacctcattaatccaatcaaacgcctagcattaggaagcatcctagcaggcttccttatctcactaaatattcctccaactaacattcaaattctcacaataccctgacatttaaaaataacagccctacttattacaatcctaggatttgccattgccctagaacttaacaatttaacactaaatctatcaataagcaaacccaccaaactatcatcattctcaacctccctaggctactacccaccaattataccccgaattattcctcaaaaaactctaaattctagctacaaattatccttaaacctactagacctaatctgactagaaaagacaatcccaaaatcaacctcaatcacccaaacccaactatctaaaataatatccaaccaaaaaggactaatcaaactatatttcctatcatttctcatcactatttcactaatttttatcttacacacacttaatcccgagtgatttcaataataataaaaatccccgcaaacatagaccacccagccaccactatcattcaagtagcacaactataaatagccgcaaccccaatccccccctccaacataaccccaacatcatcaatctcatacattaatcaatcgcctagactatcaaaatcaactaactccaccttattattcaaactaaacaagtagaacactaccaactccataaaaagccctaaaacaaaaaaactaaaaataaaccaattagaccctcaagtttccgg

SEQ ID NO: 1367 - DNA, 1093 bp, Rattus norvegicus
cggggggacattcctgtgttccaggagtacaagaacaaggggattattttcaataatgggcccacatggaaggatgtgcggaggttttccctaagcattctccgagactggggaatggggaaacagggtaatgaggcccgcatccaaagggaggcgcaattcctggtggaggagctcaaaaagaccaaaggccagccttttgaccccacatttctgattggctgcgcaccctgcaatgtcattgcggatatcctcttcaacaaacgtttcgactacaatgacaagaagtgtctgaggctcatgagtttgttcaatgaaaacttctacctgctgagcaccccctggatccagctttacaataactttgcggattatctacgatacctacctggaagccatagaaaaatcatgaaaaatgtgtctgaaataaaacagtacacacttgaaaaagccaaggaacaccttcagtcactggacatcaactgcgcccgggatgtgactgactgtctcctcatagagatggagaaggaaaaacacagccaagaacccatgtacacaatggaaaatgtttctgtgactttggccgacctgttctttgcaggaactgagaccaccagcacaactctgagatatgggctcctgatcctcatgaaatacccagaaattgaagagaaacttcatgaagaaattgacagggttattgggccaagccgcgtccctgctgtcagagacagactggatatgccctacatggatgctgtggtgcatgagatccagagattcatcaatcttgtcccttccaacctaccccatgaagcaaccagagatactgtgttccaaggatatgtcatccccaagggtacagttgtgattccaactctggactccctcttatatgacagccatgagtttccagatccagagaagtttaaacctgagcatttcctgaatgaaaatgggaagttcaagtacagtgactatttcaaggcattttctgcaggaaagcgtgtgtgtgttggagaaggcctggcccgcatggaattgtttctgctcctgtctgctattctgcagcattttaacctgaagtctctgg

SEQ ID NO: 1368 - DNA, 1136 bp, Rattus norvegicus
gcggtctagggagcggcggcactggcagaagcggctgttacagcggcggtggcggcgacggctgttgctgagccccggcagccgcgaggaccccgggctggggccacgcgggcctgaggctcggctccagcagcccccaagcggacgaacccgcgctctgtctcccaaggcgaagtccgaggtctcaggtatggatctttggcgggtgttcttaaccctggcactggcagtctccagcgacatgtttcctggaagtggggctacaccagctactcttggcaaagcttccccggttctgcaaagaattaatccaagcctgagggaaagttcctctggaaagcctcgattcaccaagtgtcgttcccctgaactggagaccttttcatgctactggacagaaggggatgatcataatttaaaggtcccgggatctattcagctatactatgctagaagaattgctcatgaatggaccccggaatggaaagaatgccctgattatgtctctgctggagcaaacagctgttacttcaactcatcgtatacctccatttggataccctactgcattaagcttactacaaatggtgatttgttggacgaaaagtgtttcactgttgatgaaatagtgcaacctgatccgcccattggcctcaactggactttactaaacatcagtttgcctgggatccgtggagatatccaagtgagttggcagccaccgcccagtgccgatgttctgaagggatggataattctggagtatgaaattcagtacaaagaagtaaatgaaacaaaatggaaaacgatgagcccgatatggtcaacatcagtcccactgtactcactgagactggataaagagcacgaagtgcgtgtgagatccagacaacggagcttcgaaaagtacagcgagttcagtgaagtactccgtgtaacgtttcctcagatggacacactggcagcatgtgaagaaggacccaagttcaattcccagcacccacatcaagagattgacaaccacctgtaacaccagctccagaggatctgccatccctagccttgcgggcacctgcattcatatgcacatacatgcatacacataattaaaattaataaaataaaattttaaaaat

SEQ ID NO: 1369 - DNA, 601 bp, Rattus norvegicus
ctctctgtggctgttacggtatgattttgtgttcgaatacccccggccagtcatgcccaacatgatcttcattggagggaccaactgcaagaagaaggggaacctgtctcaggaatttgaagcctatgtcaacgcctccggagaacatggcatcgtggttttctctttgggatccatggtctcagagattccagagaagaaagcgatggaaatcgctgaggctttgggcagaattcctcagacgctcctgtggcgctacaccggaactagaccatcgaaccttgcaaagaacactattcttgtcaaatggctaccccaaaacgatctgcttggtcatccaaaggctcgggcgttcatcacacactccggttcccatggtatttatgaaggaatatgcaatggggttccaatggtgatgatgcccttgtttggtgatcagatggacaacgccaagcgcatggaaactcggggagctggggtgaccctgaatgtcctggaaatgactgccgatgatttggaaaacgcccttaaaactgtcatcaataacaagagttacaaggagaacatcatgcgcctctccagccttcacaaggaccgtcct

SEQ ID NO: 1370 - DNA, 603 bp, Rattus norvegicus
gcatctgtgtggctgttccgaggggactttgtgtttgactacccgaggcccatcatgcctaatatggtcttcattggaggcataaactgtgtcatcaagaagcccctctctcaggaatttgaagcctatgtcaacgcctccggagaacatggcatcgtggttttctctttgggatccatggtctcagagattccagagaagaaagcgatggaaatcgctgaggctttgggcagaattcctcagacgctcctgtggcgctacaccggaactagaccatcgaaccttgcaaagaacactattcttgtcaaatggctaccccaaaacgatctgcttggtcatccaaaggctcgggcgttcatcacacactccggttcccatggtatttatgaaggaatatgcaatggggttccaatggtgatgatgcccttgtttggtgatcagatggacaacgccaagcgcatggaaactcggggagctggggtgaccctgaatgtcctggaaatgactgccgatgatttggaaaacgcccttaaaactgtcatcaataacaagagttacaaggagaacatcatgcgcctctccagccttcacaaggaccgtcct

SEQ ID NO: 1371 - DNA, 361 bp, Rattus norvegicus
ttctctttttgcaccaacaggatgaaaccaaaggagactatgaaaaaatcctggtggctctgtgtggaggaaactaaacatcccaactgctctgtaagattccgaggagaacatctcttagccgttgttttcttcctattgcaaggcttaagtaggaaagttgctttgtcagtaagtctaattaccttctttgaataatgtagcctataaatatgttttagatcattcctctgtacaatagagaaatacttgttttgttaattatgtttatcccaaattataaatccctgtaagcaagtcatttggtaccattcctgagaaagaagtttacatagactaaaataaaacaattttataagac

SEQ ID NO: 1372 - DNA, 1892 bp, Rattus norvegicus
aaactgaccaaggagtatgatcaatcccgtccagcctccgagcctgcagccgtttggtcatggtgagctgcttcagctaacaattgcactgacagtgctcttgagccaagttgcttctgggcggaagtagtccatctagggctcggcctctttaaagaaacagacttctgcaaccttgggactacgtttggggtcgccggctattggacggagcagcgcaattgttagctgaagcagctcaccatgaccaaacggctgcaggctcggaggctggacgggattgatcaaaacctctgggtggagtttggcaaactgaccaaggagtatgacgtcgtgaacttgggtcagggcttccctgacttctcgcctccggactttgcaacgcaagcttttcagcaggctaccagtgggaacttcatgctcaaccagtacaccagggcatttggttacccaccactgacaaacgtcctggcaagtttctttggcaagctgctgggacaggagatggacccactcacgaatgtgctggtgacagtgggtgcctatggggccttgttcacacgctttcaggccctggtggatgaaggagatgaggtcatcatcatggaacctgcttttgactgttatgaacccatgacaatgatggctggaggttgccctgtgttcgtgactctgaagccgagccctgctcctaaggggaaactgggagccagcaatgattggcaactggatcctgcagaactggccagcaagttcacacctcgcaccaagatcctggtcctcaacacacccaacaaccctttaggaaaggtattctctaggatggagctggagctggtggctaatctgtgccagcagcacgatgtcgtgtgcatctctgatgaggtctaccagtggctggtctatgacgggcaccagcacgtcagcatcgccagcctccctggcatgtgggatcggaccctgaccatcggcagtgcaggcaaaagcttcagtgccactggctggaaggtgggctgggtcatgggtccagataacatcatgaagcacctgaggacagtgcaccagaattctatcttccactgccccacccaggcccaggctgcagtagcccagtgctttgagcgggagcagcaacactttggacaacccagcagctactttttgcagctgccacaggccatggagctgaaccgagaccacatgatccgtagcctgcagtcagtgggcctcaagctctggatctcccaggggagctacttcctcattgcagacatctcagacttcaagagcaagatgcctgacctgcccggagctgaggatgagccttatgacagacgctttgccaagtggatgatcaaaaacatgggcttggtgggcatccctgtctccacattcttcagtcggccccatcagaaggactttgaccactacatccgattctgttttgtcaaggacaaggccacactccaggccatggatgagagactgcgcaagtggaaagagctccaaccctgaggaggctgccctcagccccacctcgaacacaggcctcagctatgccttagcacagggatggcactggagggcccagctgtgtgactgcgcatgtttccagaaaagaggccatgtcttgggggttgaagccatcctttcccagtgtccatctggactattgggttgggggccagttctgggtctcagcctactcctctgtaggttgcctgtagggttttgattgtttctggcctctctgcctggggcaggaaagggtggaatatcaggcccggtaccaccttagccctgccgaggctctgtggcttctctacatcttctcctgtgacctcaggatgttgctactgttcctaataaagttttaagttattaggaccctc

SEQ ID NO: 1373 - DNA, 2012 bp, Rattus norvegicus
cggtcccacttgcctctaaatgcagacagtgagtacgtcacattaagtgaccaccacttcttagggactgccagtagcagggggaatgatacggccagttgaggcatttagcagtggaactgttctataagtgggtatttattttcgacaaggtaggccacactggcctcatctgctctgagtcttcctaatatagaaagtcatggaagttgtatgtagatgcctttgtgttaaatcttgcttcagaatcagagtgggatctctgggacacataccaagctcgtttgccttcattctgtattttgtttctttgataaaataatgattttcattttttgcttaatactacattcttaagctacatagactctctccgtgatacaacaggcagtgcatgctgttactagttcttttctcctagtaaggcctacacagttatttcttgttaagaagctgtgagatgtgacctccttcctgcttagcatcacacagaaaatctgatttcaagtatctcacttattcccaccgcatcactgtcagaacagcctctcagattcacccaaagaaatacaatcatgatgactcaaatggtgtataactcaggtccagtaattctgcataggtaatcagttaaaacagtttaaacatgaaattgattcaaatattgataatgttttactaatgtgagcaacagtgttatggaaaggattcatttgactcttgtggaatgggcctgtctaatttttcttaacataatcggtaaagtattactaagaaatgctccatcctgtttctgtccaagaaaggaaagcgatacctcctgctccctgaggtggcactagggatttaaccgggaccaggaccgcctgcacgctaggcaagcactctacaaatgagatatattcctagaccaacaaatccttttgttcttctaataatttgtttaaggagtttaatcttgaactccagatgcccgcatagtcttatctgggaagatattcgtttatttctcattttgtcacccatatctacttttttcttagaggttgatgtacagatatctaaaaatatgtattcctcaatgatcttatttaggagagtgtttttactgtcatatttaaaaatagattattttcatgctgccttctgttgattttggcaaattgtataatagatcgtcttgatcattgcattttttgtcttgtaaatgtatattttgtctttgtaaattcatttacttctcaggtgtgactttatggttgactttaaacgtatgaatgaatgaggatgtaaggaaagctgtcttatttattaacgtagatgcggtaaaagaagggtatttgggtttgagcttctttttatttgagtatagaaagttatgcttttaagtaaagaaatagcaagtacagaggaaataaaaataaatagaagaaagtaaaaaggaaaaaaaccctaagaaaatgaaacaaaaaaaaagatgtaagcgaaagcaagccacatgtgatggccaatgcctgtgaccagcacttgagagactaaggcaggaagaatactacaagcttgaggcatgtgtggtttcagagtgactttgaagcccgtctgggccatagagtaagaccaggttttgttctggagaacataaacaagagtatatgataattacagggaatagtctcatggatttacataaagacaacaagagggcttaagtggagatgtgtggtgctgaagtcttgcagattggaggcagggcctgacagagcatccaccattaccaaaatccttaggatctgggagcaacaccatagctgccaagggtctgatttaaatctgttctactcactggtcagcatattggactctgctactaatataatgttaaaatagcatacctggtaaaaataaaatacacgaagtgtgttgagtgtttgagatgaaagtaaaagaaaacctaaatcattgggcaacttgggaggaaaatcattttaaataaacaaatcacatcattaccg

SEQ ID NO: 1374 - DNA, 1380 bp, Rattus norvegicus
gaattccggccttccctccgtggctccggcgctgcccggtcccctcgggcggcagctgccatgggcaccgacagccgcgcggccggagcacttctggcgcgggccagcaccctgcacctgcagaccgggaacctgctcaactggggccgcctgcggaaaaagtgtccgtccacgcacagcgaggagcttcgagactgtatccaaaagaccttgaatgaatggagctcccaaatcagccctgatttggtcagggagtttccagatgttttggaatgtaccatgtcccatgcagtggaaaagataaaccctgatgaaagagaagaaatgaaagtttctgctaaactgttcattgtaggatcgaattcttcatcatcaactagaaatgcagttgacatggcatgctcagtccttggagttgcacagctggactctgtcatcatggcttcccctccaattgaagatggagttaatctttccttggagcatttgcagccttactgggaggaattagaaaacttagttcagagcaagaagattgttgctataggcacctcggatctagacaaaacacagttggagcagctgtaccagtgggcacaggtaaaacccaatagtaatcaagttaatcttgcctcctgctgtgtgatgccaccagatttgactgcatttgctaaacagtttgacatacagctactgactcacaatgacccaaaagaactgctctctgaggcaagtttccaggaagctcttcaagaaagcatccctgacattgaagcccaggagtgggtgccactgtggctgctgaggtactcggtcatcgtgaaaagcagaggaatcatcaagtcaaaaggatacattttgcaagccaaaagaaagggttcttaactacagctcaagctcacaactcaggggccttgtatttatctggaacataagataaaaattcatgataaaattgagatgtgtaaaaaaaaatctagctctcgcctacaaaaagcgtcactgaggcgtgaatgtggtggtttggcaatgtgttgagtttaagtacctccctggcgtctgcagcagcgcactcacaggaagcattgtattctcttcattaaactcttggtttctaactgaaatcgtctataaagaaaaatacttgcaatatatttcctttatttttatgagtaatagaaatcaagaaaatttgttttaagatatattttggcttaggcatcagggtgatgtatatacatattttttatttctaaaattcagtaactgcttcttactctatacttctataactaagcaattacattacagttgttaagacatactggaagagatttttttcctgtcgtttgacaaaataatctatctcagagtcggaat

SEQ ID NO: 1375 - DNA, 436 bp, Rattus norvegicus
actttattttggactgtggtacggccaacaagaccactctgtatgcaaaagcccaacatggctgtaactggagatgaaactgatgaggagactgaccttgccccaagtcacatggctgctgccacaggtgacatgccaacttaccagatccgagctcctactactgctttgccacaaggtgtggtgatggctgcctcaccaggaagcctgcacagtccccagcaactagcagaagaagcaactcgcaagcgggagctgaggctgatgaaaaacagggaagctgctaaagaatgtcgacgtcgaaagaaagagtatgtcaagtgtcttgagagtcgagtcgcagtgctggaagttcagaacaagaagcttatagaggagcttgaaactttgaaagacatttgctctcccaaaacagattagtagaaatatttaacta

SEQ ID NO: 1376 - DNA, 351 bp, Rattus norvegicus
tcttccaactcaaccaaccactcgattaatctttccttgcctgagaccagttgaaagcactggagtgcagggaggagagggaagggccaggctgggctgccaggttcaggtctcctgtgcactgagggccagacaaacaccatgagaaggacctcggaggctgagaacttactgctgaagacacggacactcctgccctgctgtgtatagatggaagatatttatatattttttggttgtctattaaatacagacactaagttatagtatatatctggacaaacccacttgtaaatacaccaacaaactcctgtaactttacctaagcagatataaatggctggtttttag

SEQ ID NO: 1377 - DNA, 2010 bp, Rattus norvegicus
tcctcctactgtgaacatcagtgctctggcctccgtctcctggcctccctcgcgccatggccccgaagcggcaatctgcgatcctgcctcagcccaagaaacccagacccgttgctgccccgaagctggaggacaagtcggcctctcccggcctgccgaagggagaaaaagaacagcaagaagcaattgaacatattgatgaagtacaaaatgaaatagacaggcttaatgaacaagccagtgaggaaattttgaaagtagaacaaaaatataacaaactccgccaaccattttttcagaagaggtcagaattgatcgccaaaatcccaaatttttgggtaacaacatttgtcaaccatccacaagtgtctgcactgcttggggaggaagacgaggaggccctgcactatttgaccagagttgaagtgacagaatttgaagacattaaatcaggttacagaatagatttttattttgatgaaaatccttactttgaaaataaagttctctccaaagaatttcatctgaatgagagcggtgacccatcttcaaagtccaccgaaatcaaatggaaatctggaaaggatttgacaaaacgctcaagtcaaacgcagaataaggccagcaggaagaggcagcacgaagagccagagagcttctttacctggtttactgaccattcagacgcaggtgctgacgagttaggagaggtcatcaaagatgatatttggccaaatcctttgcagtactatttggttcccgatatggatgatgaagaaggagaggcagaggatgacgatgacgacgatgaagaggaggaagggttggaagacattgatgaagaaggagacgaggacgaaggtgaagaagacgatgatgaggatgaaggggaggaaggagaggaggatgaaggcgaggatgactagcacagaagaccgatggatccaaccttctttttcattttctttttattttttaaatttccccagtccctgggagcgagttgcagtcctttcctccctgtccctctgtgctcagccgccctgtttttgaggtctcaacatcatggttctcaactaatttggggggaaaatatcttgagcaaaatacaacaggaaaagaatcttcacgtttctgttctaaattcatttttatccttgtctcaaactgtggattcaacaccaccaccatgctctgtgggaagaaagaaaagccctccagttcccttggctctgctggaggctggagggtgctaggccctgtgtagtagtgcatagaattctagctttttcttttctctgtatattgggctcagagattacactgtgtctctatgtgaatacagacagttagcatttaccaacatggatctgtctactttctcttgtttaataaaaaggaaaaaaaaagaaaaaggggggggatagacagtgagcaagggtgggatcgaggtgtcgggggggtatgtgggcatctgacaacatggcttctcctttggcatgtttcattgtgacgtttaacagacatccttgccgtttaaggtgacacttaaataaaataaaactctcctgatgaagacttgagcccgcctctcacgggagaaccagcagacgctgtaggggtttatttggagttggcattctctgttgtaactttgatctttagtttttttctttccttttttttctcttttttttttttctctttttttactctttttcttttcactggaaggaaaaagagtctcattttaaatgttgccgtgtaccaagttgctttgttacaataaaatcaatgtgtacacaagtttgacctgcataatgacaccatgtcaaactttgtctccctaacttcgtattttttatacgcactttgcaggatgacctcagggctgtgcagattgagttaaagggatttgaatcatgtcttaacgtctccgtaactgagtgggcacagcttgctgctgtggactcgtacctttggtttttatctcacatttggcattttttt

SEQ ID NO: 1378 - DNA, 433 bp, Rattus norvegicus
accctcatccatgtgttccatgcccactcgggcaaggaaggggacaaatataagctgagcaagaaggagctgaaagacctgctacaaactgaactctccagcttcctggatgtccagaaggatgcagatgctgtggacaggatcatgaaggaactggatgagaatggagatggggaagtggacttccaggagtttgttgtgctggtggctgctctcacggtggcttgtaacaacttcttctgggagaacagttgagcacagtctcagtaggcagcgccctccctcttttgctcctcatcccacctgtatctccctatgtacccatccttgcccaggctcaacatgcaccaaaggcgcaacagtagcagtcctgccactagttttaataaagcttctctctcccgaaaaaaaaaaaaaaaaaaaaaaaaaaaaa

SEQ ID NO: 1379 - DNA, 195 bp, Rattus norvegicus
actctcactatgaatcctgtgtggagagggaatgtgacattttaaagttatttcttttgagagacttgttttggatgctcccccaagcctccctctcccctgcactgtaaaatgttgggattatgggtcacaggaagaagtggtttttttagttgaatttttttttttaacattcctcctgaatgtaaatttgta

SEQ ID NO: 1380 - DNA, 704 bp, Rattus norvegicus
cgccaccgcgtctccttgctgcttttgtgctctcccgctcgccatggccagccttaaggacctggaagggaagtggcgtctggtggaaagccacgggtttgaggactacatgaaggaactaggagtagggctggctcttaggaagatgggtgccatggccaaaccagactgcatcattaccctcgacggcaacaacctcaccgtcaaaactgagagcacggtgaagacgaccgtgttttcttgcaccttgggagagaagtttgatgaaaccacagctgatggcaggaaaactgagacggtctgcaccttcacagacggtgccctggtccagcaccagaagtgggaagggaaagaaagcacgataacgagaaaactgaaggacgggaagatggtcgtcgagtgcgtcatgaacaatgccatctgtactcgggtctatgagaaggtacaatgaggactggctaactcgtcatcctggacagcagtcagctggctgagggaataagctcaattcaatgagcaggtcgtacagaaccacactgcttcacttctttggttttatttttcatgacttttcatcatagacactttacccgaaacccatgtcagaccgttggtttacccaggatcattcctttggttagtaaataaatgcgtttgtgctaaaaaaaaaaaaaaaaaaaaaaaaaaaaaaaaaaaaaaaaaaa

SEQ ID NO: 1381 - DNA, 2986 bp, Rattus norvegicus
gtgctcctgggggcggcgcgcgggaccgtggcgcttccggcagcgggaggcggcacggagcgggaccgagaggcgcgggtggcggccggggaggcggatctgggacaatgtctggggaagtgccacccaacattaacatcaaggagcctcgatgggaccagagcacgttcattggccgagccagtcacttcttcacggttactgatcccaaaaacatccttttaacgaacgaacagctagagaatgcgaggaaagtggtacacgattacaggcaaggaatcgttcctgccggcctcacggaaaatgagttatggagagcgaagtacgcgtatgactcggccttccatcccgacacgggtgaaaagatgactctgataggaagaatgtcggctcaggtcccgatgaacatgaccatcacgggctgcatgatgaccttctaccggaccacaccggctgtgcttttctggcagtggataaaccagtccttcaatgccgtggtcaactacaccaatagaagtggtgacgctccccttactgtaaatgagctgggaacggcttatgtttctgcaacaaccggcgccgtggcgacagcccttggactcaatgccctaaccaagcatgtgtcgccgctgataggacgttttgttcccttcgctgctgtagctgctgctaactgcattaacatcccgctgatgagacaaagggaactcaaggttggtattcctgtcactgatgagaatggcacacgcttgggagaatcgaccaacgcagcaaagcaagccatcacgcaggtggtcatctccaggatcctcatggcggcccctggcatggccatccctccgtttatcatgaacaccttggagaagaaagcctttttgaagaggttcccgtggatgagcgcaccaattcaagtcacgctggttggcttttgtttggtgttcgccacccccctgtgctgtgctctgtttcctcagaagagttccatgtctgtgacaagcttggaggatgatttgcaagccagcatccaaaagagtcatcctgaattacggcgtgtgtactttaacaagggcctgtgaagccaagatcaagtgctggaggcacctcctgccatctgtgaacctcctgaagccaagcagtgaggaaatacgtgtgctgggcactccccgctacaaaagcctctgcaaaatctgtgttagagtcaagctgcctgtcaggagcctgacatttgaatcatgttgtaatttacaaaaaatacccttctggtagattttaatgatgccgttttttccaaagcccccaccttgagctttcaaaagctctggtgggcatagcatatatgctccagttacacactcagcaaacactggttatcaatcattggaaaggttaccagctcaactatcacattctgtttctacttctctccactgggtctcagcaatgaattggaaacacaaaggtctaagacaaatatccaaatttaaatactaaggaaactatatctccagtttggcaatggaccagtccaaagtagaacctcaattaaaaaaattgaggttcagagcataaacactccatacaccttcctgaagtcagccatagaccagggtaggatgccttccctgccatcctggattcttcaactcttcaatgtgtttagtgttcttaaaatattaattgtacctcacaggtactttatatcatgaatttccatcaaatacttaactgaaatggtctattcagtaccagtacaatgtgacattgactgggtgaccggtttttcagaagtgaaaccatagtccctatatgcctttttccccccatccttgtagaatttctttggctttcaggaagatatacagaaaccacacaaactagtccagcaactgtgcacattgtgctgcgttccaccctgtttgaagaccatgaagtcttgtggcatgtcaacatttctatggtgattttacatgtgacatattgggtgtagctgaggttgctttggaagtctgtggctattccacgtcatagacaagccacttgttacgctgagtgaaaaatcattgttaattcagatatttgtacgtggaaaaaaaccccacaaaaatagagactatctagtttctgtagattctttttcccaatgtttccagattgaatttcctcataaagaaaatatggtgtgccttgtgtctgtgcttctccttcctctgaaaggatggatggatctgaagcccccagccctcccccatgctgctagaatcttctgtggcgatgaccgccaaaccacctgaaatgcagtggctccctgtggcactctggcctcggacgagcctcactgccttcagtgcttctgttttaaacggtggtgagagcctggagctcaaggcagagtccacaggtgcttaaagaacactttcagaagaagctgaaggcctcgaggtctgttcatcaagccaatctcagagtccttgccccagtgcgtgtgtagctctgagaatgtgaagactcagttggaagatggtccaactcaccaagtgtcggcccagttagtgagaaacgcgcagtagacatggagctgggctcttttgaatttgttttgtgaagtgtcggcctcttactgcttttgtatagtgatactcactgtgtggtttaatcatgatttataaaaaaaaaagaagcaaatgaatgaaaattggcaatctttgctgatcttctaaaaatacttttttttcctgaagaaaaaagccacatgaagtgcaataatgttgtgcggtgacttgctgatagttctctgacgagagatagttatgtgtgtgtgactggctggcagatatcagtattagcgaggtctcttgccaatatcagagtcagtgtgtcatttcagtttaactggatgaactgtcaaataaatgcagaatgaaaataaacgactcttatttgtccgtgaaaaaaaaaaaaaaaaaaaaaaaaaaaaaaaaaaaaaaaa

SEQ ID NO: 1382 - DNA, 746 bp, Rattus norvegicus
ccatgtattccagaaaggccttgtacaaaaggaaatactctgctgccaagacaaaggttgagaagaagaagaagaaagaaaaggtccttgctaccgtcacaaaaacagttggtggggacaagaacggtggcacccgggtggtgaagcttcgaaaaatgcctaggtattaccctactgaagacgtgcctcggaagctgctgagccacggcaagaagcccttcagccagcacgtgaggaggctgcgctccagcatcactcccgggactgtcctgatcatcctcactgggcgccacaggggcaagagagtggttttcctcaagcagctgggcagtggcttgctacctgtgactggacctcttgcctcaacagagttcctctgcgtaggacacaccagaagtttgtcatcgccacctctacaaaagttgatatcagcaaggttaaaattccaacacctgactgatgcttacttcaagaagaagccacttcgcaagcccaggcatcaggagggtgagatcttcgacacagagaaggagaaatacgaaattacagagcagcgaaaggctgatcagaaagctgtgactcgcagattttgccaaagatcaaagctgtcccccagctcgagggcctacctgcggtctcagttctccctgacgaacggcatgtaccctcacaaactggtgttctaattgttaacaacctaataaaactgcttcataaagaaaaaaaaaaaaaaaaaaaaaaaaaaa

SEQ ID NO: 1383 - DNA, 1052 bp, Rattus norvegicus
gcagcggggaccttattggactatctccccttaagtgggaagggcttagtcaaatgcagtaaagagctataaaacaccgagaactcttgatgtgttgtgaaacttagagggagcagctttttaacaagagaactcaagcaattgctgccatgccggggaagccagtccttcactatttcgatggcagggggagaatggagcccatccggtggctcctggctgcagctggagtagagtttgaagaacaatttctgaaaactcgggatgacctggccaggctaaggaatgatgggagtttgatgttccagcaagtgcccatggtggagattgatgggatgaagctggtgcagaccagagccattctcaactacattgccaccaaatacaacctctatgggaaggacatgaaggagagagccctcatcgacatgtatgcagaaggagtggcggatctggatgaaatagttctccattacccttacattccccctggggagaaagaggcaagtcttgccaaaatcaaggacaaagcaaggaaccgttactttcctgcctttgaaaaggtgttgaagagccatggacaagattatctcgttggcaataggctgagcagggctgatgtttacctagttcaagttctctaccatgtggaagagctggaccccagcgctttggccaacttccctctgctgaaggccctgagaaccagagtcagcaacctccccacagtgaagaagtttcttcagcctggcagccagaggaagccattagaggatgagaaatgtgtagaatctgcagttaagatcttcagttaattcaggcatctatggatacactgtacccacaaagccagccttcgaaagctttgcaacaatcgcatattttgactaaatgttgaccctacttattgggaggccaacacgttttctaatgcttctgtgttaattcatatagacatgactgatgaggaattgctgggatgctatttggttgtagttaaaatttgaaatcatgatcacttcctcagatattactttgaatctcaataaaaa

SEQ ID NO: 1384 - DNA, 1129 bp, Rattus norvegicus
cagaccccctcgtaggacagactgttagaacaggctgtgcttcatctctgtttagagaactcaagcaattgctgccatgccggggaagccagtccttcactacttcgatggcagggggagaatggagcccatccggtggctcctggctgcagctggagtagagtttgaagaaaattttctgaaaactcgggatgacctggccaggttaagaagtgatgggagtttgatgtttgaacaagtgcccatggtggagattgacgggatgaagctggtgcagaccaaagccattctcaactacattgccaccaaatacaacctctatgggaaggacatgaaggagagagccctcatcgacatgtatgcagaaggtgtggccgatctggagttgatggttctctattacccctacatgccccctggggagaaagaggcgagtcttgccaagatcaaggacaaagcaaggaaccgttacttccctgcctatgagaaggtgttgaagagccacggacaagattatctcgttggcaacaagctgagcagggctgatgtttccctggttgaacttctctaccatgtggaagagatggacccaggcattgtggacaacttccctctgctaaaggccctgagaaccagagtcagcaacctccccacagtgaagaagtttcttcagcctggcagccagaggaagccttttgatgatgagaaatgtgtagaatcagcgaagaagatcttcagttaattcagtcagctatggatacactgtacccacaaagccagcctcagaaagctctgcaacaatgaagtattttgactaaatgttgaccgtacttattgggagggtaacatgttttctaaggcttctgtgttaattcatatagacatgactcatgaggaattgctgggatgccatctagttgagttaaaacctcaatctcgatcacttcctcggatattttcttaatgttcaataaaacaaaacaagcttcttagacgctggagtatccaaacattgtcatgaaatagctgtcatatccttgtcaaacagcgtcacgtagaaaccctcgtgtcaaactctcttacgcaaaagtaatctttccttatggagagtgtcctttctctcgtgccg

SEQ ID NO: 1385 - DNA, 525 bp, Rattus norvegicus
cgcgctttacaccgtcctccggccgtcgctcgcagtctctccgccaccatgcctatgttcatcgtgaacaccaatgttccccgcgcctccgtgccagaggggtttctctccgagctcacccagcagctggcgcaggccaccggcaagccggcacagtacatcgcagtgcacgtggtcccggaccagctcatgacttttagtggcacgagcgacccctgcgccctctgcagcctgcacagcatcggcaagatcggtggcgcccagaaccgcaactacagcaagctgctgtgcggcctgctgtccgatcgcctgcacatcagcccggaccgggtctacatcaactattacgacatgaacgcagccaacgtgggctggaacggttccaccttcgcttgagcccgggcctcacttacctgcaccgctgttcttcgagtcttgctgcacgccccgttctgtgtttatccacccgtaatgatggccaccttccggtcgggagaaataaatggtttgagaccaaaaaaaaaa

SEQ ID NO: 1386 - DNA, 2211 bp, Rattus norvegicus
ggcagagcacaaaggatggggcagctgctctctttgacctggctgctgctggttatggtggtaactccctggttcactgtagctggagccaatgactcaccagaagcaagaaggtgttctgaatgccacgacaatgccacctgtgtgttggatggggtggtcaccacatgctcctgccaggcaggcttcactggagatgggctggtgtgtgaggacatagatgagtgtgccaccccgtggactcacaactgctccaacagcatctgcatgaacacactgggctcctacgagtgctcctgtcaggatggctttcgtctgacgcctgggctgggctgcattgatgtgaatgagtgcacagagcaggggctcagtaactgtcattccctggctacctgtgtcaacacggaaggcagctactcatgcgtgtgtcccaagggctatagaggggatggttggtactgtgagtgctcccctggcttctgtgagccagggctggactgcttgcctcagggtcccagtggaaagctggtgtgccaagacccctgcaatgtctatgaaaccctgactgagtactggcgcagcacagactatggtgccggctactcctgtgactcagatatgcacggctggtaccggttcacaggccagggtggcgttcgcatggctgagacctgtgtgcccgtactgaggtgcaacacggctgcacccatgtggctcaatggctcgcatccttcgagcagagagggcattgtgagccgcacagcctgcgcacactggagcgaccactgctgcctgtggtccacagagatccaggtgaaggcctgccctggtggcttctatgtttacaacttgacagagccccctgagtgcaatctggcttactgcaccgatcctagctccgtggaggggacttgcgaagaatgcggggtagatgaagactgcgtatctgataacggcagatggcgctgccagtgtaaacaggacttcaacgttacagatgtctccctcctggagcacaggctggagtgtgaggccaatgaaatcaagatatccctcagcaagtgccagctacagagtttgggctttatgaaggtcttcatgtacctgaatgacagacagtgctcaggcttcagtgagaggggtgaacgagactggatgtccatagtgactcctgccagggatggtccctgtgggacagtattgaggagaaatgaaacccacgccacctacagcaacaccctctacctggcaagtgagatcatcatcagggatatcaacatcagaatcaactttgaatgctcttaccctctggacatgaaagtcagtctgaagacctccctacagcctatggttagtgccttgaacatcagcttgggtgggacaggcaagttcactgtgcagatggcactgttccagaaccctacctacacacagccctaccaaggtccttctgtgatgctctccactgaggcttttctgtatgtgggcaccatgctggatgggggtgacttgtcccggtttgtactgctaatgaccaactgctatgccacacccagtagcaactccacggaccctgtaaaatacttcattatccaggacagatgtccacatacagaagatacaaccattcaggtgacagagaatggcgagtcctctcaggcccggttctctattcagatgttccggtttgcaggaaactccgaccttgtctaccttcactgcgaggtgtacctgtgtgacactatgagtgagcagtgtaaacctacctgttctggtactagatatcgaagtgggaacttcatagatcagacccgtgtcctgaacttgggtcccatcacacgacaaggtgtccaggcctcagtgtccaaggctgcttccagcaacttggggttcctgagcatctggctgctgctgtttctctcagctactttgaccctgatggttcattgatggaaaacagaaaacctggtgtggctcccagttcacttcctgctggccaggagtggggatgcaggctggtaagcagccaggagagagggagctcacactgcctccagcttgcacttacccttttcctttaaccctcaccatcaaaaccgagttgatatctttcaatgctgctgattcttcaactggaacttgtaatgtgtctgtacatgaagcccctgtctctttaaggaatgtatcaaaataataagtttaaaacaatcc

SEQ ID NO: 1387 - DNA, 1747 bp, Rattus norvegicus
gcagctgctccgctcgctctcgaacctccgtcttcagctcactgccttcactccagacttcaccatgtccgtcagggtgactcagaaatcctacaagatgtccacctccggtccccgggccttcagcagccgctcgttcacgagtggacccggtgcccgcatcagctcttccagcttttcccgggtgggcagcagcagcagcagcttccgcggaagcctgggcggctttggcggggctggtgtcgggggcatcacggcggtcacggtgaaccagagcctgctgaaccccttgaagctggaggtggaccccaacatccaggctgtgcgcactcaggagaaagagcagatcaagaccctgaacaacaagttcgcctctttcattgacaaggtacgcttcctggagcagcagaacaagatgctggagaccaaatggagcttgctgcaacagcagaagacatccaggagcaacatggacaacatgtttgagagttacatcaacaacctccgtcggcagctggaagccctgggccaggagaagctgaagctggaggtggagcttggcaacatgcagggcctggtggaggacttcaagaataagtatgaggatgagatcaacaagcgtacagagatggagaatgagtttgtcctcatcaagaaggatgtggatgaagcctacatgaacaaggtggagcttgagtcccgcctggaaggactgaccgacgagatcaacttcctccggcagatccatgaagaggagatccgtgagctgcagtctcagatctcagacacgtctgtggtgctgtccatggacaacagccgctccctggacatggacagcatcattgctgaagttcgtgcccagtatgaggagatcgccaaccgcagccgagctgaggccgaaaccatgtaccagattaagtatgaggaattgcagaccctggctgggaagcacggggatgatctacgtcgctcgaagacggagatctctgagatgaaccgtaacatcagccgcctgcaggcggagattgacgccctcaaaggccagagggcaaccctggaggcggccattgctgatgcagagcagcgtggggaactggccgtgaaggatgccaatgccaagctggaggatctgaagaatgccctgcagaaggccaagcaggacatggcccggcagctgcgcgagtaccaggagctgatgaacgtgaagctggcgcttgacatcgagatcgccacctaccgcaagctgctggagggcgaggagagcaggctggagtctgggatgcagaacatgagcatccacacgaagaccaccagtggctacgcaggaggactgagttcatcctacgggggactcactagccccggcttcagctatggaatgagctctttccagcccggcttcggttctgttgggggatccagcacttatagccgcaccaaggctgtggtcgtgaagaagattgaaacccgagatgggaaactggtgtctgagtcttgtgacatcatgtccaagtgaatggccactgaagtcattgccagcctgaggtcctgcagctgctcaggggtcaaggggagacagctgtatggcagagtgcagggaactagggaccagccagagtaccagccctaaacctctggccaaccttgggaggaatttctatctgggatatgccaatgcccaactcaattgtattttccaaaataaagcctcagtggctgtaaaaaaaaaaaaaaaaaaaaaaaaaaa

SEQ ID NO: 1388 - DNA, 2190 bp, Rattus norvegicus
ctgttagccagaactaagtcactgcccacacagcaattacaccatgaatctctaacatcacaaccttctttcaaatactgtaaaaaaaaaaatactggaaaacctttttagatttgtttcaatctaccacgcttctgaaatgttcagctattaaggggaatgtcaatatatatatacagcccaaattagcgaagcccaaattagggaagcacatagcatggcatacttgagaggttggcaaacaagagggaagcaggtactttctgcaaaaacagggactgtgcgccacaatgagaccgctgtgaccttacttcaaactgtgaaactgtgtgcagcagtaggatttggagtcttaaattcagaaggagcagaaagaaagagagttagacgtttgaattcctggtgcttatgctgacgttttctctcatttgccagcattaaaatctcaagtaaggtgtctcctgtgccaggacgtgtcaggtagacctttctcagtgagctggaatcctgccttctgtgtcatagagttgtaagagcagcagtttctacccatcatgctgtgtactcactgctgcagagcaagtgggaggggccagagatgggccgtccccaggggcggatagcgcggtacacttaattctcttctgcctgaaagcacacttccccgtaagcgaatacagacagaactttgattgagctggtatctgaccgataggattgcttctttgatgtacctctttgacctagctagcatttcagctttgatactgcagaacgatcttttcaaattataatcattctgatagagatatcttaatagacgtgcttttaaaaacaaaacggaaactactgtcagtatgaatactgagccagactggcattcatagatttaacaacttgtatttctaagattcttaactctataaaagtaatatggcttttagatatataggataataatttcagtgagaccgttatctctttactcaacattatgttagggacagtataagccaagcacttacctgttacacattggagactaaaacgactgcccccaaccttagtaagtatgaaaactagactcacattatttcatttttaactgctaaaagtatgtctatagaatttaaaatttaagcactactatttgtcctggccacatttttcaaaaattaagttaaaagttattaattatatacaggtgtgtatttctaataattaaaatacctttcaaatccatggaatgtctgccttttaaatgtaatttgggcttttttgtttgattctttttcacttaactagctgtttatttgtaaacatttctttccacgatttaaaaacacttccaatcggctttacttcctgatttagcacttcctattttgacccttgggcatctgttcttcgtttaattggtgtagaataatgataaaaatcccaagctagtctaaccaaactgcattcttaagagtactaagtgggaatgatgcaaagttcatcaagaattgaaaagaagccggtctttgcactaaggaagacagcataattaagtcttctcgttgccatctgagtaatatcatgatatggggaccgcagaatccatctccggtgggatgatggtatagctttcctagttccagaaaaaatctccttcacattttatataataatttaatcacaatgtccatcgaattcttccttaggcattctttgtaacagtagtgtgctgctctttaaaatattaacctctgacacatgtgtgaacctcattccctgtggtcactaaaatttcttccccactgagcatcaatctttagcagattttaggaaaatactgaattcttagtcaggaaatattttaggaataatcttgctaacagtatattaagtaataaaattacccactctatgtgtgtttcattttttttaatttacatagacaatggtttttataaagcaatgatttcaatttttcccagctacccaaagtcctggttaatttgtgaacacaaattttgttagccttcaagtttaaacggtgctgaattgtcttaacttgaatgtaaaaatggattaaggcttatctcatgggacacaaacatgtcccatatgactgcttgctgcgtactaggggacatgccatttggtgttaaattgtctataataaagttcggtttctcccaaaaa

SEQ ID NO: 1389 - DNA, 1008 bp, Rattus norvegicus
  misc_feature (1)..(999): n = a or c or g or t
acacccaaagccaagatgtccagcaagagagccaaggccaagaccaccaagaagaggccccagagcgctacgtccaatgtcttcgctatgtttgaccagtcccagatccaggagtttaaggaggccttcaacatgattgatcagaaccgtgatggcttcattgacaaggaggacctacatgacatgctggcctccctggggaagaaccccacggatgagnacctggagggtatgatgaacgaggccccgggacctatcaacttcaccatgttcctcactatgtttggggagaagctgaacggcacagaccccgaggacgtgatccgcaatgcctttgcctgctttgatgaggaagcctcagggttcatccacgaggaccacctgcgggagctgctcaccaccatgggcgaccgattcacggatgaggaggtggacgagatgtaccgtgagcgcattgataagaagggcaacttcaactatgtggagttcactcgcatcctcaagcacggcgccaaggacaaagacgactaggctcttcttagctgtcccaatgcctacaccccatcccagtcacctcctcaacaacacatacactctaccctccccatgaggagttagggtcccggctcccagggcaggaaatgagccattaagacgcacagggtgaggctaggggttccaccacggacccaggcactagaggaagggccacagtggggaggtgagccaagggtggggccagctagcaccaaagtgaaggaagccactgaagatggccaccctcagccatgccctcccattccagggctaccctgaggaagaaaacacccatgttctggtgttggacactaattcccagcatccccacaaaggtacacacccattcaccatgtcccttcagaggatgacagtctgcacttcacctatggagttgtcccagcacacccagaatgcatagagggacgctgcctgagggacaaattctctaatacaaggctgagcacaaaa

SEQ ID NO: 1390 - DNA, 1618 bp, Rattus norvegicus
actgtgttcagaagcatctgacgggggtctgaaagcaggatgagaacatgcgaaatctgctagcacagtcacccctgaaccccagggctatggttctacaagacacatagctctctaaggctgcatacggtgcatgcatgtgaatgaaactgtggaagccaaaggggcccacttggatcctcactatgactgtgtaagctcatatcgtgttgatggaaacaaagtcattcaaggacaaaacttaggagctttagaaagcttcaggaactagccacatttcctgtttgattctatggatgagaaagatgccatttttatcttaaagtagacttctatcaatggaaaatctgccctctgcgctgggaagtgagccagccaatcagtgacaataagagactgtcatacaaagaatcagtaaagactctaaccttctcaagctctggtgtttgaagcctttgtctgagtctgggtccatgcttcagaaggggtaaggtgacatccactgactgtacctctctgaacccaaggtacagaagaacaggaagccccaatcaacttcataatcaacccagatgctgcagcccatacagaatttggcctgaatgatttcctgtggagcattaaatggaggccaagtccactctttagatattaaatgaatattcttttgcaaaggagaatgagttgaaagtgttggagagactgaagggatgactctgtaatgaaagcctgggtctggaccgccagtaaccacatacaaagcctgacttactagcagtcagtactcctactggggaggtggggataggaggatgtctctggtttgctgggcagctgaatgggtgatgcccaagttcaatgagagactaaagagggtgaaggggctggagagaagattctggttaaaagtgccgtggccgctcttccagagaacctaagtttggttcttggcacggtacttgataactatctataactccagtttcagggcatctgatgttcttttctggcatccatgagcatcaggtgcacagatatacatgcaagcaaaacaccgtacacatacaattaaaaaaacaaggtagagaatgactgaagaagaatcttatgttaacttctgatctacacacacacacacacacacacacacacacacacggcatagtgatgtttgtttcaatattcaatggataggttctggggctacaggtctggtaaaagaggttttaatccttcctctttcaagatggtaccgaggaatgggaaagcagtgagcctggaagagggtgtagtgctaacacaccctcttcttgtgtccttgtgtttctctgcccggtggttgaactgagattctaggtatggaggaagaaggaataagatacagagtcacagtcagggtgttgctgctttcttgtctctgagggccattcctgtgtcttccaaagggaacaagttagcaggagaacttctttggaggaaggttctagtgtgaaggtcttgtttcttcatttccatacctgtatcattccaaattcaccttgaaaaaaaaagtagagttcaaagctgctcaaagatcaaaatttttttggtatgtgattaataaatttctgaaaccgta

SEQ ID NO: 1391 - DNA, 3001 bp, Rattus norvegicus
cggcacgagtgttcttgccctcgtagccctctgtccagccgccatgataagcgccagcagagccgcggccgcgcgtctcgtgggcaccacagcgtcccggagtcccgccgccgcccgtcaccaggatggctggaatggccttagtcatgaggcttttagatttgtttcaagaagggattatgcgtcagaagcaatcaagggtgcagttgttggaattgatttgggtactactaactcctgtgtggctgttatggagggcaaacaagccaaggtcctggagaacgccgaaggtgccagaactaccccttctgtggttgcctttacaccagatggggagcgacttgttggtatgccagcaaaacgacaagctgtcaccaatccaaacaataccttctatgctacaaagcgtcttattggacgacgatatgatgaccctgaagtacagaaagacactaagaatgttccctttaaaattgtccgtgcctccaatggtgatgcctgggtggaggctcatggaaaactctattctccgagtcagattggagcgtttgtgttgatgaagatgaaagagactgcagaaaattacttgggccatacagcaaaaaatgctgtgatcacagtccctgcttatttcaatgactcacagcgacaggccactaaggatgctggccagatatctgggctaaatgtgctccgagtgatcaacgagcctacagctgcagctctggcttacggtctggacaaatccgaagacaaagtcattgctgtatatgatttaggtggaggaacctttgacatttctatcctggaaattcagaaaggagtgtttgaggtgaaatccaccaatggggacactttcttaggaggtgaagactttgaccaagctttgttacggcacattgtcaaggagttcaagagggagacaggggttgatttgaccaaagacaacatggcgcttcagagggttcgggaagctgctgagaaggctaaatgtgagctctcctcatctgtacagactgacatcaacttgccataccttacaatggatgcttctggaccaaagcatttgaatatgaagttgactcgagctcagtttgaaggcattgtcacagatctaatcaagagaactattgctccgtgtcagaaagctatgcaggatgcagaagtcagcaagagtgacataggagaagtgatcctggttggtggcatgacgaggatgcccaaggttcagcagactgtgcaagatctttttggcagagccccaagtaaagctgttaatcctgatgaggctgtagccattggagctgccattcaaggaggtgtgttggctggtgatgttacagatgtgctactcttggatgtcactcccctctctctaggtattgagacacttggaggtgtctttaccaagcttattaataggaacaccactattccaaccaaaaagagccaggtattttctactgctgctgatggacaaactcaagtagagattaaagtgtgtcagggggaaagagagatggccggagacaacaaacttctaggacagttcactttgattggaattcccccagcccctcgtggagtgcctcagattgaagttacatttgacattgatgccaatgggattgtgcacgtttctgccaaagataaagggacaggacgtgagcaacagattgtaatccagtcttctggtggattaagcaaagatgatattgaaaacatggttaaaaatgcagagaagtacgctgaagaagaccggaggaagaaggaacgtgttgaagcagttaatatggctgaaggaattattcatgacacagaaaccaagatggaagaattcaaggaccagttgcctgctgacgagtgcaacaagctaaaggaagagatttccaaaatgagagaactccttgctcgaaaggacagtgaaacaggagaaaacattaggcaggcggcatcttcccttcagcaggcatcattgaaactctttgaaatggcatataaaaagatggcatctgaacgggaaggttctggaagttctagcactggggaacagaaggaagatcagaaggaagagaaacagtaatagtggcagtgcattgtggagctaggacgacatactatgaagcttgggagtaaaggaacttcctgagcagaaaaggggcaaacttcagtctttttactgtatttttgcagtattctatatataatttccttaatatataaatccagtgacaatatataaatccagtgacaatagctataactcatttaatggtaataaagtcagcaatagcaggttcacacttctataactagcctgctgttttcagctgcacgtaaaggggtgggatggggctgtgtaccaatcattattaggtaaatctggtttgtgctgaagtagctatgttttcgagatggaagcccatttcacatgcagtagaggtaatctgtcatggaccttgaattgaggttcatatgcagatgcttgttgaccaagagcactgctataaatgacctgtgtgtacatttgctccttcaactgatgccttgcaagactaagctctctgtgtcatggtctataggtacagaagttaggtcaatggataacagctgtgttagccatagcttaaagtgatctatcaagaattatacaagcctctcatgggcctaaggcatacttctccagctaccctcttgggtggccaatgtctgacatctatattcttgatgattgttcctttttcatccattctggattttttttttttttaataaaattctgaaagcctcttgatctcctttgtgaatggtagtagctcaaggactatgactgtaccatcaggtttgtgagtagaggtaaaaaatcaacactggctaaaaggttgaacaaattaaacatggtgagggactaaataacatgttggcatgtatgctggatgtggaagcccactcaggaagcagtgtgaagccaggcggggctacacaatgagacaccccgtct

SEQ ID NO: 1392 - DNA, 867 bp, Rattus norvegicus
tggtagtggtttccgcgacaggcaggtgcgactgctttagcccggcctgggctccacggctgcctggagggtctctgcagtgcccaccccttctcctccgggaccccacgccagcagcgaccctgagccagcagccggagcgaccggcaatggcggcctcgacggcctcgcaccggcccatcaagggaatcctgaagaacaagacctctacgacttcctcggtggtggcctcggccgaacagccccgccggaccgtcgaagaggagctgagtaaaaagtctcagaagtgggatgaaatgaacatcctggcaacatatcatccagctgacaaagactacggcttgatgaagatagacgagccagacactccataccacaatatgataggtgatgatgaagatgtctgtagtgattcagaaggcaatgaagtcatgactccagagatcttagcgaaaaagttagctgctgctgagggctccgagccaaagtttcggactcgggaacaagaaagcagtggagaggaagacaatgacctctcccctgaagagcgagaaaagaagcggcagtttgaaatgaaaaggaagcttcattacaacgaaggactgaatattaaattagccagacagttaatttcaaaagacctacatgatgatgacgaagatgaagaaatgtcagagactgcagatgcagacagcatgaatattgaagagtcaaatcaaggatctactgcaggcgaccatctgcagcacaaatcacaaagttcataaacgtgttcatcagtgcagtcgttgtcaaatacaaaccttgttacttataccacactgcttcttgttctctacgactcgtgactatgtaccaaaatacaca

SEQ ID NO: 1393 - DNA, 3144 bp, Rattus norvegicus
ccgtgactgaagaagccattgccaagggtatcgcaggattgttgctgtcacaggtgctgtagactgaggttgaaggactaccccggagacggctgcagtcgttcggttcctgtctcttccgtgtaggatttgatttctcctaaacttggtttaagacttttaaagaaggccctaatttatcgaggcctgtttgtgaagtaaaattcggctggctactctcaacggaagaaagatgcaactgctaggccgggtgatctgtttcgtcgttgggatcctgctttctgggggcccaacggggaccatatcagctgtggaccctgaagcaaacatgaatgtgactgagataatcatgcactggggatatccagagcactcagtacagacaggagatggctacattctgggtgttcaccgaatcccgcatgggcggaagaaccagtttgataaaggtcccaaaccagttgtgtatcttcagtggcgacatggcttcctggcagattctagtaactgggtcacaaacattgacaacaacagcctgggcttcatcctggcagatgctggctttgatgtgtggatgggaaacagcagaggaaacacctggtctcggaagcacaagactctgtcagtttctcaggatgaatactgggccttcagttttgatgagatggcaaaatatgacctccctgcttcaattaactacattttgaataaaactggccaagaacagctgtataatgtgggccactctcaaggctgcaccataggttttatagcattttcacagatgcctgaactggcaaagaaggttaaaatgttttttgccctggctcctgtgttgtctctcaattttgcttcgggcccgatggtcaaattgggacggttgccggatctgcttcttgaggacttgtttgggcagaagcaatttcttcctcagagtgcaatggtgaaatggctaagcactcacatttgcacgcacgtcatcatgaaggagctttgcgccaacatcttctttctgatatgtggcttcaatgagaagaatttaaacatgtctagagtggatgtgtatacaacacactgtcctgcgggaacctctgtgcaaaacatggtacactggacccaggttgttaaataccataagcttcaagcttttgactggggaagcagtgacaagaattattttcattacaatcagagttatccacccttgtacagcataaaagacatgcaactacccactgctttatggagcgggggcaaggactggctggcagacaccagtgacatcaatatcttactgactgaaatccccacgttagtgtaccacaagaacattcccgagtgggaccatctggattttatctggggtttggatgccccctggaggctgtataatgaagtagtcagtctaatgaagaaataccagtgagtgccaagacttgagatgcttccccttcactaggggaaaaaaggacagatgtttgcttaattcctgcaaaatactgtgttttcctggtctagatcatttgtattttttatgtgcaagaaaacgatgatgttgaagacatacatgggtctggtcagtaagaagcacgctggctgtcttctgcttcattctgactgacaagccagagtcacaaccagtgatgcctttgaagtttttagaaagtatgggtgttacgtgaaagaagccattgcaacctcttgtttactttttacggtcgttttcggtgtctgcatgctgtgcatatacatgcctatgtgtgtgccctgtgctggccagagcctccttgtgtggaggtaatggctcacatcagggtatcttccctcagacactggtctctcgacgaaccagtcagtagcttgctattccagttagactggctgaccagggagcctccagaatctgtccgtctctaccttccctcaccaggtctacggagggtgatgtcccagccagcattttacactggttctagggacaggaactcaggttctcatgcttgatagcaagccctttcttcaccaaaccattgcctcaaaccctctgtgatcgaaaagctgctcaattacctttatgttcccacccaatgcaagtgaacgagcacaagacatttcaagctgttgtttgtgagctaaaaatcaatctgccagtgacttgaacatgctagggagaaactcctggccctgagcttgacaaacctgcagtccaggttctccagagattgagacagggaggctgctgttacatttagggttcatttggagagtgagactttgtctctacaaaaccaaagacaaaggagaagaagaaaaaaaaaaccctaaagtactcagttctcatctgttagcctcagagggcttagagagttcctgtgtttacctatccgaacaacattttcatgtctttatgcagtagctacctagtgaaatccagtgttatcccagcttctccaggcgtaaacattctctcttcaatctcatcagacctcagtagcaagcatttagtgaatatttagatttttcaggccaagccaagacaaaaatgaatagaataaaagaaaaaagagcccagactcttgaaagcggtttgcactgatttaaaaataaaaaaaaagaatcttgaagaatgacatgataaactgtgttggttccgcatgtgtagtcggatcccttttctgtggagaacgttctgtggagggacaaaccactaatttgccccaagtgaatgtggctgtagtgacagcgacagtgcctctgatcctgagaagcagggctggctgccggtgacaagcatcccagttcctttccccagagatgaagaggatgttttcagacagagctcggctcagggaatttcgcttggagaatcagtggtttatgtgcacaatgttttagtgagcctgctctgcgcctgatatggggaagccctcgactgttcaccgggctcgtgggcgacggctgccgtcagctggacagtggataagttttctgagtagtcaccacagattcagggatatcgctttgtgtcgactcctaaggaaggcaggacgatatgacttggtaacattgtaaaggttcacatttaaacttttcaataaatctcagcctcacaggcctgaacatcaaaaaaaaaaaaaaaaaaaa

SEQ ID NO: 1394 - DNA, 1742 bp, Rattus norvegicus
cggagacctgatttccagaagcagctgggtaggcaccatggccgggagcaccaccatcgaggcggtaaagcgcaagatccaggttctgcagcagcaggctgatgatgcggaggagagggccgagcgcctccagcgggaagtggagggagaaaggcgggcccgggagcaggctgaagctgaggtggcctccttgaaccgcaggatccagctggttgaagaggagctggaccgcgcccaggagccgcttgccactgctttgcagaagctggaggaagcggagaaggctgctgatgagagtgagagaggtatgaaggtgattgaaaaccgggctctaaaagatgaagaaaagatggagctccaggaaatccagctgaaggaagcaaagcacattgcagaagaggcagacaggaagtatgaagaggtggctcgtaagttggtgattattgaaggagacttggaacgcacggaggaacgcgccgagctggcagagtcccgttgccgagagatggatgagcagatcagactgatggaccagaacctgaagtgtctgagtgctgctgaagaaaagtactctcaaaaagaagacaagtatgaagaagaaataaagattcttactgataaactcaaggaggcggagacccgggctgagtttgctgaaagatcggtagccaaactggaaaagaccattgatgacttggaagataagctgaagtgcaccaaagaggagcatctctgtacacaaaggatgctggaccagaccctgctggacctgaacgagatgtagaccttccccatccctgccctgccctgctggccgctcctccctctgaccttgactccgcctgaggccagcctccctgaagctggcttgaaactgagggctgatctttttaactgaaggctgctttccctcctgccacccctcttacccctcttgtctttttcacaaaactgtgtcagcctcttcccagagttccagctggagggctgaacacctttgggaacaatatttaagggaatgtgagcacagcgcaaagtgtcctcaatgcagttgtgatatgcacattgtgattactttttgtcttagcaaccattttaacattccaagcacttgtcaggcttggagcagcacatcttagcctaatggataccgtctctccatggaggagaaacacaggaatgggcctgccttactgagagccagcagagcccaggcagactccactgtgggagacctcagtgctctgtaccaagtcttagccaaacaacagggattctaggaagttagccaaaaacaaaaaccattccggtctgtgaaggttttcagctttgatatctttgaacaactttacacttatttttagttttgactttttccgtccgatgtgaccaaataggagagtgagacatctgagacgcccccgcctcccagggccttgtgcatgttaggccagcgtgctaccgttcacccccagccctgagcccgaacttgtctcagctctacccctttcccaactgctcagaaatggatcatgatgccccttagtgttgtggtgacctcttagtgttcacctgcccccaagggagacggaaaaggaaattatgtttgtgcccactgatttagccacatgaaagtcatctcattgctctttcctgaagctgctgtctctaaagtgccatctctttgtgctttgtatcagtcagtgctggagaaatcttgaatagcttatgtttaaaaaaaa

SEQ ID NO: 1395 - DNA, 185 bp, Rattus norvegicus
aataaaatatgtgtcatccattctttttgagtaaggtgatatttattgattctctgttgacaaaacctaaatatttctctacttgtacagagtgttaatcttctcactttcttctacagtagtttctatcatatgttttattaatagcatcagaaaatcatgggctggtgggatggttcttccaa

SEQ ID NO: 1396 - DNA, 1274 bp, Rattus norvegicus
aagtcacatattaaccgatggatacactaaactggtttcctgcaacctgagggtggctcctgataggtaccaatttggaccatggaacagagtccaggaatgtttccgaccctgccctaaagaaggcagacacttctttagcagccgttgtccagaccccctcgtaggacagactgttagaacaggctgtgcttcatctctgtttagagaactcaagcaattgctgccatgccggggaagccagtccttcactacttcgatggcagggggagaatggagcccatccggtggctcctggctgcagctggagtagagtttgaagaaaattttctgaaaactcgggatgacctggccaggttaagaagtgatgggagtttgatgtttgaacaagtgcccatggtggagattgacgggatgaagctggtgcagaccaaagccattctcaactacattgccaccaaatacaacctctatgggaaggacatgaaggagagagccctcatcgacatgtatgcagaaggtgtggccgatctggagttgatggttctctattacccctacatgccccctggggagaaagaggcgagtcttgccaagatcaaggacaaagcaaggaaccgttacttccctgcctatgagaaggtgttgaagagccacggacaagattatctcgttggcaacaagctgagcagggctgatgtttccctggttgaacttctctaccatgtggaagagatggacccaggcattgtggacaacttccctctgctaaaggccctgagaaccagagtcagcaacctccccacagtgaagaagtttcttcagcctggcagccagaggaagccttttgatgatgagaaatgtgtagaatcagcgaagaagatcttcagttaattcagtcagctatggatacactgtacccacaaagccagcctcagaaagctctgcaacaatgaagtattttgactaaatgttgaccgtacttattgggagggtaacatgttttctaaggcttctgtgttaattcatatagacatgactcatgaggaattgctgggatgccatctagttgagttaaaacctcaatctcgatcacttcctcggatattttcttaatgttcaataaaacaaaacaagcttcttagacgctggagtatccaaacattgtcatgaaatagctgtcatatccttgtcaaacagcgtcacgtagaaaccctcgtgtcaaactctcttacgcaaaagtaatctttccttatggagagtgtcctttctct

SEQ ID NO: 1397 - DNA, 2480 bp, Rattus norvegicus
gaattcggcacgagtagactcatggcttcgcctctgaggttcgacgggcgtgtggtcctggtcaccggcgccgggggagggttgggcagagcttatgccctggcttttgcagaaagaggagcattagttgttgtgaatgacttaggaggggacttcaaaggcgttgggaaaggctcttctgccgcagacaaggtcgtggaagaaataagaaggagaggcgggaaagcggtggccaattacgattcagtcgaagcaggcgagaagcttgtgaagacagcactggacacattcggcagaatagatgttgtggtgaacaatgctgggatcctgagggaccgttccttctctaggataagtgatgaagactgggatataattcaaagagttcatttgcggggctccttccaagtgacccgggcagcatgggatcatatgaagaagcagaattatggaagaatcattatgacggcctcagcttctggaatatacggcaactttggccaggcaaattatagtgctgcaaagctgggccttctgggtctcgccaatactctcgtgattgaaggcaggaagaacaacattcattgtaacaccattgccccaaacgctgggtcacggatgacagagacggtgatgccagaagacctcgttgaagccctgaagccagagtatgtggcaccgctggtcctttggctttgccatgagagctgtgaggaaaatggtggcttgtttgaggttggagcaggatggattggaaaattgcgctgggagaggaccctgggagccattgtcaggaagcggaatcagcccatgactcccgaggcagtgagggacaactgggtgaagatctgtgacttcagcaatgccagcaagccgaagagcattcaagagtccacaggtggtataatcgaagttttacataaaatagattcagaaggaatctcacaaaatcacaccggtcaagtggcatctgcagatgcatcaggatttgctggcgtcgttggccacaaacttccttcattttcttcttcatatacggaactgcagtgcattatgtatgccctcggagtaggagcttcagtcaaaaatccaaaggacttgaagtttgtttatgaagggagtgctgacttctcctgtttgcctacatttggagtcattgtcgctcagaagtccttgatgagtggaggcttagcagaggttcctgggctgtcaatcaactttgcaaaggttcttcatggggagcagtacttggagttgtataagccacttccccgatcaggggaattaaaatgtgaagcagttattgctgacatcctggataaaggctctggcatagtgattgttatggacgtctattcttattctggcaaggaacttatatgctataatcagttctctgtcttcgttgttggctctggaggctttggtggaaaacggacatcagaaaaactcaaagcagctgtagccgtaccaagtcggcctccagatgctgtactgagagataccacttcactgaatcaggccgctctgtaccgcctcagtggagactcgaatcctttacacattgacccgagctttgcgagcattgccggttttgagaaacccatattacacggattatgtacttttgggttttctgcaaggcatgttttacagcagtttgcggataatgatgtgtcaagattcaaggccattaaggttcgttttgccaaaccagtgtatccaggacaaactctacaaactgagatgtggaaggaaggaaacagaattcattttcaaaccaaggtccaagagactggagacattgtcatttccaatgcatatgtggatcttgttcctacatctggagtttccgctcagacaccttctgagggtggagcactgcagagtgctcttgtatttggggaaataggtcgacgcctcaaggatgttggacgtgaggtggtaaagaaagtaaatgctgtatttgaatggcatatcacgaaaaatgggaatgttgcagccaagtggaccattgacctgaagaacggctctggagaggtttaccaaggccctgccaaaggctctgctgacacgaccatcacaatttctgatgaggatttcatggaagtggtcctgggcaagcttaacccacagaatgccttcttcagtggcagactgaaggcccgaggaaacatcatgctgagccagaagctacagatgattctgaaagactatgccaagctctgaaggacccactgcgtgctttaataaaaccagaatcattacgttctgtctacgcagtcatgctccagccttctttgaaacgatccacggtaatgtgcagcagaaattgcttaacattttcagattcagataactttcagattttcattttctactaatttttcacatattatttttacaaggaactgtaatctagctagcaaataattgttctgttcatagatctgtatcttaataaaaaaaaaaaaaaaaaa

SEQ ID NO: 1398 - DNA, 1790 bp, Rattus norvegicus
aattcaggcagatagtgaatggctatcgccaccagaagcacaagaagggaaggttatttcaggaacctctgatgctgcagatccccaagactgtggactggagagaaaagggttgtgtgactcctgtgaagaatcagggccagtgtggttcttgctgggcttttagcgcatcgggttgcctagaaggacagatgttccttaagactggcaaactgatctcactgagtgaacagaaccttgtggactgttctcacgatcaaggcaatcagggctgtaatggaggcctgatggattttgctttccagtacattaaggaaaatggaggtctggactcagaggagtcttatccctatgaagcaaaggatggatcttgtaaatacagagctgagtatgctgtggctaacgacacagggtttgtggatatccctcagcaagagaaagccctcatgaaggctgtagcgacggtggggcctatttctgttgccatggatgcaagccatccgtctctccagttctatagttcaggtatctactatgaacccaactgtagcagcaaggacctcgaccatggggttctggtggttggctatggttatgaaggaacagattcaaataaggataaatactggcttgtcaaaaacagctggggtaaagaatggggtatggatggctacatcaaaatagccaaagaccggaacaaccactgcggacttgccaccgcagccagctatcctatcgtgaattgatggacagcgataataaggacttacggacactacatccgaaggagttcatcttaaaactgaccaaacccgtctctgagtgagaccatggtacttgaatcgttcaggatccaagtcacgatttaaattctgttgacatttttacatgggttaaatgttaccactacttaaaactcctgttataaacagctttataatattggacacttaatgcttaattctgattctggaatatttgttttataaaagttgtataaaactttctttaccttttaaaaataaattttagctcagtgcatgtgtgtgtgtatgggttaggggaacttcctgtgtgaaatgtgttcacaaatgtttgagactaaagactgactgattccagatgtccggactgattcgggtgtcagtggtagacctggggaaaggtgacaggtgctctggatggagccttctgattttacctcagcgtcctgtcaggttaggtatgtgtaagtaaatctagcttatggggtaattgttttttctttatttgtgtgagtatgtgtgtgtggaggtcagagaacaactcatttctacagtgttgatcctagcgatcaaaatcaggttgtcaggctggaccacaggtgccttttactactgaggtatcttgccagccccactggttttaagtgacgtataattacatatgtttatgtagtacaatataatgtgttgtgatacgtgtatactatgaaatgatctgatagttcacctcaaatattttattactttgttgaacttttctagctgtttctaaaatacacagtatattatcattggacctgtcttgttaatgtagcccaggctggccttaagccataatcttccttctcagccttctgtgagctaagataaaaaaaaaaaatcatgtaatgttatacccagtctcaagtcttatatctggcaaaccttgacagtccagaagaactagagtaaattgtttgacagtcctctcaactttcctaattctgtgacctttcaatatagttcctcctgttgtgaccccaaaaa

SEQ ID NO: 1399 - DNA, 811 bp, Rattus norvegicus
ggaattccgctgctgtcgctaagctaaagtcactgacgtttccgccaccatgctgcccgccgcattgcttcgtcacccaggtctgcgccgtctggtgctccaggcgcgtacgtacgcccaggccgccgcctcacctgcccccgccgctgggcctggacagatgtccttcaccttcgcctccccgacgcaggtgttctttgatggtgccaatgtccggcaagtggatgtgcctacgctgactggagcctttggcatcctggcatcccatgtccccacactacaggtcctacggcctgggctggtaatggttcatgcggaagatggcaccacaactaagtattttgtgagcagcggctccgtcactgtgaatgcggactcctctgtgcaattactagctgaagaagtcgtgacactggacatgctggacctcggggcagcccgggcaaacctggagaaggcgcagtcagagctgtcaggggcagcagatgaggcagcacgggctgagatccaaatccggatcgaggccaatgaagccctggtgaaggccctggagtaggcgtactttgtctgtcacccacagggtaacagaggcaggtcctggggggctgaagtcgccaccagggggcagcagtgctccggttactggcttaaagcttccctggtgctgcctgccaggtcatggagggcttccccaggcttccagagtctgggatccccaggatgcctctggagagctggccttgattgcccctcaaagccacccggacagtcagctggcccagcctatctgcattaaataccacggaattcc

SEQ ID NO: 1400 - DNA, 3378 bp, Rattus norvegicus
atggagcaaagctacggaggttatggggcatggagtgctggacctgccaacacccagggtacatatggaagtggtgtggccagctggcaaggttatgaaaactacagctactacaatgcccagaacaccagtgtccctacaggaacaccctatagttatggcccagcctcgtgggaggccaccaaggccagtgatggtggcctggcagctgggagttctgctatgcatgtggcctcttttgccccagagccatgcaccgacaactctgactcgctcattgccaagatcaatcaacgtttggacatgttgtccaaggaaggaggcaggggtgggatcagcagcggtggggagggcatgcaggaccgagacagctccttccgcttccagccatatgagtcctacgactccaggccctgtatgcctgagcatactccctaccgccccagctacagttacgattatgactttgacttgggaactgaccgcaatggtagttttggcgggacattcaacgactgtcgggacccaaccccagagcgaggcgcccttgatggtttcttaaggggccggggccagggccgcttccaggaccggagcaactcgagcaccttcatacgtagtgaccccttcatgccaccctcagcctcctcagagcccttatccaccacctggagtgagctgaactacatgggtggacgtggtctaggtgggccctccaccaacaggccgcctccttccctcttctcccagtccatggcccctgactacagcatgatgggcatgcagggggtgggcggttttggtggcaccatgccttatggatgtggccggtcccagactcggatacgggattggcccagaaggagggggtttgaacgctttggaccagacaacatgggcaggaagcggaagccgtttccattgtatgaagaacctgatgccaagctggcccgtgctgacagtgaaggagacctctctgaaaacgatgatggagctggtgacttacggtcaggagatgaagaatttaggggggaggacgacctctgtgactcccggaagcagagaggagaaaaggaggacgaggatgaggatgtgaagaagagacgggagaagcaaaggaggagagatcggatgcgggaccgagcagctgacaggattcagtttgcctgttctgtgtgcaaatttcgtagctttgaagatgaagaaatccaaaagcatctgcaaagtaaatttcataaagagaccttgcggtttataagtaccaaactacctgacaagacagtagaatttctccaggagtatatcataaacaggaataagaaaattgagaaacggcgtcaggagttgttggagaaggaaagccctaaacccaaaccagatccattcaaagggattggccaggagcatttcttcaaaaggattgaagccgcacactgcctggcctgtgacatgctgattcctgcacagcaccagctcctgcagcggcatctgcactctgtggaccataaccataatcgaaggttggctgctgaacaattcaagaaaacaagtctccatgtggctaagagtgttctgaacaacaagcatatagtgaagatgttagaaaaatacctcaagggcgaggatccttttgtcaatgaaactgctgatcttgagacagaaggagatgagaacttaggagaggagaaggagacaccagaggaggtagctgcggaagtcttagcagaggtgatcacagcagcggtgaaggctgtagagggggatggagaaccagctgcagagcatagtgacgtcctagctgaagtggaagggcctgtggacaccgccgaggctggtagtgactcccacactggaaagctgctagaagaacagacctgtgaaacagcatctgaaaccaggaacatggaagacatggccagaggtgaggctgctgaggccagaaatgaagcagctgtgccagcagcagccgccggaagcccagtacctgtcatagccatcccaggaatcctggaagatgagctggaacaaactgatgcagaggccaaagatactcccacagaataatgatcttctcttccctgtttcaagggacgtgttatatcatgtgttctttgttttataagctgtactggggtgtgtgttattcggtggaaagactgggccatttccttcccagtgtacctcaaggattgatgctatacagtagatggcttcccacctctgttagaaatacaaaaagaggtaaaccattttcccaagtggcctttgatggctatctgtgcactgcagctagaatagtaagagtagatcttcctgacacttgttgagtcctgaattggacagaatgtgaggatttttgttttgttttgtgttgtgtttttgtttggtcttcgtttcactttattttgctttttctcttgggaagcaatctgatacgaacatagcttacttgagaaaaaaattatttaggggaattcccttattcacctctgcatggttgatgtgggacatacacagttcaaccatccatgtgtgcaagagctgagattgtgccctccaccaataaacagtcttgtttcaataaacatcaggccatttcctaactgtcggcattgaaatagcatcttgcttggaccaagctagctttagaactcaatcctactgtttagcctctgcagtgctggtgccatgagtgtacggccatgctcagtggggctttggttttgcaatacactgtatcctatgttcctctccagctgtggcagcattagacagatgacatggcagtgacttggctgtgtttgagatggtccctcaggcttccactggaaggacccgcacctgagcctgtagatcgaagacactgctaaggccttggttctcactgttcagtgcttgctaatcagttggtgttcgtctcccacctctattagtggatgttttgttgtttgctctctttccttttgttatttccacctaaaggtatttagaaaaccatggaattactccattgatgaaaaacaaatgtggacttcatagttgggatctgtctgtcaaaagctcaaaccgttaagtaaaagtgtttgactaaagcaagtagtagtccgagcaaggagctagcatgtctctaaagcagcatgtgctaaggttttacaggctcagaatgatgggtctcccccgttttgaagttacaatgctgtgtccatttgtacacagctcacatcttggaaacatgagccagtgagggactacggaagagatggtagaccatcacagcaatttcatcagcacgtctgtctgttaaggagcattactggggatgtgatagggactttggaatatcattgtcaaaacaagcaataaattgatgccacggag

SEQ ID NO: 1401 - DNA, 1255 bp, Rattus norvegicus
gcggccgcagctgccgggagatgcgagcgcagaccggattgtgatcacctttccctcttcgggctgtaagagagcgagacaagccaccgaagcgaggccactccagagccggcagcggagggacccgggacactagagcagctccgagccactccagactgagcggacgctccaggtgatcgagtccacgctgcttcctgcaggcgacaggcgacgcctcccgagcagcccggccactggctcttcccctcctgggacaaacttttctgcaagcccttggaccaaacttgtcgcgcgtcaccgtcacccaaccgggtccgcgtagagcgctcatcttcggcgagatgtctgagcgcaaagaaggcagaggcaaggggaagggcaagaagaaggaccggggatcccgcgggaagcccgggcccgccgagggcgacccgagcccagcactgcctcccagattgaaagaaatgaagagccaggagtcagctgcaggctccaagctagtgctccggtgcgaaaccagctccgagtactcctcactcagattcaaatggttcaagaatgggaacgagctgaaccgcaaaaataaaccagaaaacatcaagatacagaagaagccagggaagtcagagcttcgaattaacaaagcatccctggctgactctggagagtatatgtgcaaagtgatcagcaagttaggaaatgacagtgcctctgccaacatcaccattgttgagtcaaacgagttcatcactggcatgccagcctcgactgagacagcctatgtgtcctcagagtctcccattagaatctcagtttcaacagaaggcgcaaacacttcttcatccacatcaacatccacgactgggaccagccatctcataaagtgtgcggagaaggagaaaactttctgtgtgaatgggggcgagtgcttcacggtgaaggacctgtcaaacccgtcaagatacttgtgcaagtgcccaaatgagtttactggtgatcgttgccaaaactacgtaatggccagcttctacaaagcggaggaactctaccagaagagggtgctgacaattactggcatctgtatcgccctgctggtggtcggcatcatgtgtgtggtggcctactgcaaaaccaagaagcagcggcagaagcttcatgatcggcttcggcagagtcttcggtcagaacggagcaacctggtgaacatagcgaatgggcctcaccacccaaacccacgcgtccggacgcgtgg

SEQ ID NO: 1402 - DNA, 2402 bp, Rattus norvegicus
gcggccgcagctgccgggagatgcgagcgcagaccggattgtgatcacctttccctcttcgggctgtaagagagcgagacaagccaccgaagcgaggccactccagagccggcagcggagggacccgggacactagagcagctccgagccactccagactgagcggacgctccaggtgatcgagtccacgctgcttcctgcaggcgacaggcgacgcctcccgagcagcccggccactggctcttcccctcctgggacaaacttttctgcaagcccttggaccaaacttgtcgcgcgtcaccgtcacccaaccgggtccgcgtagagcgctcatcttcggcgagatgtctgagcgcaaagaaggcagaggcaaggggaagggcaagaagaaggaccggggatcccgcgggaagcccgggcccgccgagggcgacccgagcccagcactgcctcccagattgaaagaaatgaagagccaggagtcagctgcaggctccaagctagtgctccggtgcgaaaccagctccgagtactcctcactcagattcaaatggttcaagaatgggaacgagctgaaccgcaaaaataaaccagaaaacatcaagatacagaagaagccagggaagtcagagcttcgaattaacaaagcatccctggctgactctggagagtatatgtgcaaagtgatcagcaagttaggaaatgacagtgcctctgccaacatcaccattgttgagtcaaacgagttcatcactggcatgccagcctcgactgagacagcctatgtgtcctcagagtctcccattagaatctcagtttcaacagaaggcgcaaacacttcttcatccacatcaacatccacgactgggaccagccatctcataaagtgtgcggagaaggagaaaactttctgtgtgaatgggggcgagtgcttcacggtgaaggacctgtcaaacccgtcaagatacttgtgcaagtgcccaaatgagtttactggtgatcgttgccaaaactacgtaatggccagcttctacatgacttctaggaggaaaaggcaagaaacagagaagcctctagaaagaaaattggatcatagccttgtgaaagaatcgaaagcggaggaactctaccagaagagggtgctgacaattactggcatctgtatcgccctgctggtggtcggcatcatgtgtgtggtggcctactgcaaaaccaagaagcagcggcagaagcttcatgatcggcttcggcagagtcttcggtcagaacggagcaacctggtgaacatagcgaatgggcctcaccacccaaacccaccgccagagaacgtgcagctggtgaatcaatacgtatctaaaaacgtcatctccagtgagcatattgttgagagagaagtggagacttccttttccaccagtcattacacttccacagcccatcactccacgactgtcacccagactcctagtcacagctggagtaatgggcacacggagagcgtcatttcagaaagcaactccgtaatcatgatgtcttcggtagagaacagcaggcacagcagtcccgccgggggcccacgaggacgtcttcatggcctgggaggccctcgtgataacagcttcctcaggcatgccagagaaacccctgactcctacagagactctcctcatagcgaaaggtatgtatcagccatgaccaccccggctcgtatgtcacctgtagatttccacacgccaagctcccctaaatcgcccccttcggaaatgtctccacccgtgtccagcatgacggtgtccatgccctctgtggcagtcagcccctttgtggaagaagagaggcctctgctgcttgtgacgccaccaaggctacgggagaagaaatatgatcatcacccccagcaactcaactcctttcatcacaaccctgcacatcagagtaccagcctcccccctagcccactgaggatagtggaggatgaggagtacgagacgacccaggagtatgagtcagttcaagagcccgttaagaaagtcaccaatagccggcgggccaaaagaaccaagcccaatggccacattgccaataggttggaaatggacagcaacacaagttctgtgagcagtaactcagaaagtgagacagaagacgaaagagtaggtgaagacacaccattcctgggcatacagaaccccctggcagccagccttgaggtggcccctgccttccgtctggctgagagcaggactaacccagcaggccgcttctccacacaggaggaattacaggccaggctgtctagtgtaatcgctaaccaagaccctattgctgtataaaacctaaataaacacatagattcacctgtaaaactttattttatataataaagtatttcaccttaaatt

SEQ ID NO: 1403 - DNA, 4801 bp, Rattus norvegicus
caaaaggagaagccatcagggaaggaatcctatctgcatatttcgtctttagccccatccctcattcccggtggggtttggaactttccatcaattctttccctgtctcatttctctttgagcctttgcctagctgtgcctgtcacagcgagaaatcagtcaccctccgccttccagcactcttaggctctgagaaatttggcatacgggtgtcaggtattaaaacagctaaataaaagatgccctggggctgaaggccagcgtggctggaagttctgggggtcagaagcctgactccgcctgctccaagctctagcaatttaagtcacccgggggttttttgttttggtttggtttggtttttcttgaccttagaaccaccgagaccatgctgttctcgctcaccttcctgtcggtgtttttaaagattactgtactcagtgtcacagcacagcagaccaggaactgtcagtcaggtcctctcgagagaagcgggactaccacgtatgccgccgccggtcctcccaggttcctgattttcttacaaggaaacagcatctttcggattaacacagatggaacaaatcaccagcaattggtggtggatgccggcgtctcagtggtcatggattttcattacaaggaagagagactctattgggtggatttagaaagacaacttttgcaaagagttttctttaatgggtcaggacaagagacagtgtgcaaggtggataagaatgtgtctgggctggccataaactggatagatggggagattctccggacggaccgatggaagggagtcatcacagtaacagatatgaacgggaacaattcccgtgttcttctgagttccttaaaacgtcctgcaaatatattagtggatccaacagagaggttgatattttggtcttcagtggtgactggcaaccttcacagagcagatctcgggggtatggatgtaaaaacactgctggaggcaccagagaggatatcagtgctgattctggatatcctggacaaaaggctcttctgggctcaggacggtagagaaggaagccacggttacattcactcctgtgactataacggtggctccatccatcatatcagacatcaagcacggcacgatttgcttactatggccattttcggtgacaagatcttatactcagcactgaaagagaaggcgatttggatagccgacaaacacactgggaagaatgtggttcgagttaacctcgatccagcctctgtgccgccaagagaactgagagtcgtgcacctacatgcacagcccgggacagagaaccgtgctcaggcctctgactccgaacgatgcaaacagagaagaggacagtgtctctacagtctctctgagcgagaccccaactcagactcgtcggcatgcgctgaaggctatacgttaagccgagaccggaagtactgcgaagatgtcaatgagtgtgccttgcagaatcacggctgtactcttgggtgtgaaaacatccctggatcctattactgcacatgccctacaggctttgttctgcttcctgatgggaaacgatgtcacgaacttgttgcctgtccaggcaacagatcagagtgtagccatgattgcatcctgacatcagatggtcctctgtgcatctgtccagcaggttcagtgctcggaaaagatgggaagacatgcactggttgttccttctccgataatggtggatgcagccagatctgccttcctctcagcctagcatcctgggaatgtgattgctttcctgggtacgacctacaattggaccgaaagagctgtgcagcttccatgggaccgcagccatttttactgtttgcaaattcccaggacatacgacacatgcattttgatggaacagactacaaaactctgctcagccggcagatgggaatggtttttgccttggattatgaccccgtggaaagcaagatatattttgcacagacagccctgaagtggatagagagggctaatctggatggctcccagcgagaaagacggatcacggaaggagtagacacgccagaaggtcttgccgtggactggattggccggagaatctactggacggacagtgggaagtctgtcattgaagggagtgatttgagcgggaagcatcatcaaataatcatcaaagagagcatctcaaggccacgaggaatagctgtgcatccaaaggccaggagactattctggacggacacggggatgtctccgcggattgaaagctcttcccttcaaggttctgaccggacgctgatagccagctctaatctactggaacccagtggaatcgcgattgactacttaacagacactttgtactggtgtgacaccaagctgtctgtgattgaaatggccgatctagatggttccaaacgccgcagacttacccagaacgatgtaggtcacccattctctctagctgtgtttgaggatcacgtgtggttctcggattgggctatcccatcggtaataagggtgaacaagaggactggtcaaaacagggtacgtctccgaggcagcatgctgaagccctcgtcactggttgtggtccacccattggcaaaaccaggtgcagacccctgcttacacaggaatggaggctgtgaacacatctgccaagagagcctgggcacggctcagtgtctgtgtcgggaaggattcgtgaaggccccagatgggaaaatgtgtctcactcggaaggatgatcagatactggccggtgacaatgctgatcttagtaaagaggtggcatcgttggacaactcccctaaggcttatgtaccagacgatgataggacagagtcctccacactagtggctgagatcatggtgtcagggctgaactatgaagatgactgcggccctggtgggtgtggcagccatgcccactgtatttcagagggagaggcagctgtgtgtcagtgtttgaaaggatttgctggcgatggaaacctgtgttctgatatagacgaatgtgagctgggtagctcagactgtcctcccacctcgtccaggtgcatcaacaccgaaggtggctatgtctgccaatgctcagaaggctacgagggagatgggatctactgtctcgacgttgatgagtgccagcaggggtcgcacggctgcagcgagaatgccacctgcaccaacacggagggaggctacaactgcacctgtgcaggctgcccatcagcacctggactgccttgccctgactctacctcaccctctctccttggaaaagatggctgccactgggtccgaaacagtaacacaggatgcccgccgtcgtacgatgggtactgcctcaatggtggcgtgtgcatgtatgttgaatccgtggaccgctacgtgtgcaactgtgtcattggctatattggagaacgatgtcagcaccgagacttacgttggtggaagctgcgccatgctgactacgggcagaggcacgacatcactgtggtgtctgtctgtgtggtggcgctggccctgctgctcctcttagggatgtgggggacttactactacaggactcggaagcagctatcagagagctcaaagaagccttccgaagagtcaagcagcaacgtgagcagtaacgggcctgacagcagcggggctggggtgtcttctggtccccaaccttggtttgtggtcctagaggaacaccaacagcccaagaatgggcgtctgcctgccgctggcacgaacggcgcagtagtagaggctggcctgtcttcctccctgtaactcgggccagtgcacctgacttcctggagacagaagccccgaatatatgagatgggcacagagcaaagctgctggattccaccatcaaatgacaaaggaccccaggaaatggaggggaacccccacttaccctcctacagggaatggcctctagctgtgtgggctgagaagaagctgcattctctccagtcagctaatggatcgagtcaacaaagggcctcagacctgccccagcaaacagagccagttctgtagaaactgggagcagacagaaggtaccgaaagtgaaatagcaaaccaggctgaagggtggtagagcggcagatctggtactcctgtctccacggctaatcactgctcagggtcctgaagataactgcatagctgcatagctgatagccgcgacttctgcttcttgcttcaagcagtcccgttgaagacgatcaaaagagaagtggagaaaaatcatcagaaaccgaagtcaagacggttcacgtgtgtaagctgtgtccttcctacccctggactgttgggctcttttccttgttgtctcagaagaaatgggttaaagcaggcgatcacatgctttgttgattgcacagtagatgatatgatctacatagatcttagctcactctcacggaaaggctggaacattatagatgctgcaagatacactgcaagtgtggcccctgctcataattttgccttctgaattgtgattagtgaaaataattgtaacttagagtccgatttattcagaatcagagcattatttttatactatgaaaatctttgaatgaagatatttaactttaaaaacatttcctaagagacaacagtgtttcttaatcattgtcttttcttcttgcagtctttcccagtgaaaacggtaaattctgctgtttgcatagaatctttaacttatttttaagatatgagattgtaaacaaattgcttgatttatttcaatcaatttattctaattatttaaataaaatcacccctaag

SEQ ID NO: 1404 - DNA, 843 bp, Rattus norvegicus
gggccgaggtgccgcggggttgctggagggtcgtgggcggcgtgcaggagacatgtcggcgggcagcagttgcagccagactcccagccgggctatccccactcgccgcgtagccctcggcgacggcgtgcagctcccgcccggggactacagcaccacccccggcggcacgctcttcagcaccaccccgggaggaaccagaatcatctatgaccggaaattcctgatggagtgtcggaactcgcctgtggccaaaacacccccaaaggacctgccaaccattccaggggtcactagccctaccagcgatgagcctcccatgcaggccagccagagccatctgcacagcagcccggaagataagcgggcaggtggtgaagagtcacagtttgagatggacatttaagggaccagccataggacgcagtgatgcttctgggcccctggggcccttgggaggagagccacagcagtcaggccttgtacccggcagacactgggtgtggatcggccacccagtcctgctcctcactcagggcacctgctctgccttccattttgtgaataccagcacatacctccttgtgcctctgttgatactgagctgctactccagggtaatgactctcacctacaccctccctgcatcaagcgccagcgagtggacacagaggagtctgtcggaatgatctggcaattctagccccaacctctggagcacacccaccttaccttaggttggggtacctgggaaagccaccctttacttctttccctgagaggaaataaaagccacatttaccctaggcccacagccgggccctgtctgaaaaaaaaaaaaaa

SEQ ID NO: 1405 - DNA, 1612 bp, Rattus norvegicus
aggcaaagggcaactgcttggaatttcagaaaatctgaaaccatgaggcatctatggctgctgctcctgtctgtttccttagttcaaactcaagctgcaactactgactccgataaagtggacctctcgattgcccgtggtcatcgacctgttgacaggagaaaggaagagcctcctagcctaagacctgcccctcctcctatcagcggaggtggctatcgagcccgtccagccaaagttgatgcaggtcagaagaaagtggaacgaaaaccccctgatgcaggaggctgtgttcacggtgacggagacatgggagtgctatgtgctacagggtgtgagttgcgtcaaactttgctaaaccacgaaaggccaatcaaaaacagtattgctgagttaaatagcaacataaactctgtttatgagacctcttcggtcacctttcagtacctgactctgctgaaagacatgtggaaaaagaagcaggcacaagttaaagataatgaaaatgtcataaatgagtattcctccattttggaagaccagaaattatatattgatgagactgtgaacgataatatcccccttaatcttcgtgtgctccgctcaatcctggaggacctgagaagcaaaatgcaaaaattggagtctgacatctcagctcagacggaatactgccacactccatgcaccgtcaactgcaacatcccggtggtgtctgggaaagagtgtgaagagatcattcggaagggaggtgagacatccgaaatgtatctcattcagcctgacacctccagcaaaccatacagagtgtactgcgacatgaagaccgaaaacggaggatggacggtcatacagaaccgtcaggatggcagcgtcgactttggcaggaaatgggacccatacaaaaaaggatttggaaatattgcaaccaacgaagatacgaagaagtactgtggcttgccaggcgaatattggcttggcaatgataagattagccagctcaccaggataggacccacagaactcctaatcgaaatggaggactggaaaggagacaaggtgaaggcacactatggaggcttcacggtgcagaccgaggccaacaagtaccaagtgtcagtgaacaagtacaaagggactgctggcaacgccctcatggaaggggcctctcagctggtgggggagaacagaaccatgaccatccacaacggcatgttcttcagcacctacgacagggacaacgatggctgggtaactacagatccaagaaagcagtgctcaaaagaagatggcggcggctggtggtataacagatgccatgcagccaatccgaatggcagatactactggggtggcctttacagctgggacatgtccaagcacggcacagatgatggtgtggtgtggatgaactggaagggatcgtggtactccatgagaaggatgtctatgaagatcaggcccgtcttcccacagcaatagtcccccaagcatagactttcagccttctatgtctgacattttttacattatgttattggaattttctttgatacattatatccactaatgctcaaaacaatggctgagtgtgtctttttttttttttttt

SEQ ID NO: 1406 - DNA, 861 bp, Rattus norvegicus
ggcacgagccaggacccccgcgcgccatgccgtccgagaagaccttcaaacagcgccggagcttcgaacaaagagtggaagatgtccggctcatccgggagcagcaccccaccaagatcccagtgattatagagcgatacaagggtgagaagcagctgcccgtcctggacaagaccaagttccttgtacctgatcacgtgaatatgagcgaactcatcaagataattagaaggcgcctgcagctcaatgctaaccaagccttcttcctcctggtgaatgggcacagcatggtgagtgtgtccacacccatctctgaagtgtacgagagcgagagagatgaagacggcttcctgtacatggtctatgcctcccaggagacgttcgggacagcactggctgttacatacatgtcagctctgaaggcaacagcaacaggaagagagccatgcttgtgacagacatacagccacttccaactaaagcaagcctctgcttcctgctacctgcatggagcccactgtgacactcagaccatccccggtcactcactcgtgtctgagaatctcagtgagagctgcctctgtcacggaccggaagccaacacagccacctctcgacctgctccccacagcacccaccctccctgcatgcaagctgtccctgctaacccccaatgttatgttacactgtgtaaatccccactgctgccgtgtgtgggttgtgtacgtcgtcatgtccctggtttataactatggtgcggtcgggaaggattcctgtaatgctgctctaaggatctggctcaggcagccattgtaggacacctgtactctgatgcactaagtccaataaaggcacaactgg

SEQ ID NO: 1407 - DNA, 1844 bp, Rattus norvegicus
ggatgtctgggaagtggatttctgctctgctcctgctgcaaataagtttctgctttaaatctgggaactgcggaaaggtgttggtatggccgatggaatatagtcactggatgaatataaagataatactggaggaacttgtacagaagggccatgaagtcactgttctgagaccttcagcttttgtctttcttgatcccaaggaaacttctgaccttaaatttgtaacttttcctacatctttcagtagtcatgacctggaaaatttttttacaaggtttgtgaatgtatggacttatgagttgccaagagacacatgtttgtcatattttctttatctacaagatacgattgatgaatattctgactactgtctgactgtttgtaaagaagcagtttcaaacaaacagttcatgacaaaactacaggaatccaaatttgatgtcgttttctcagatgccattggtccctgtggagagctgatagctgaactgctccagattccttttctgtacagtcttcgcttctctcctggctacacaattgaacagtacattggaggagttctattccctccctcctatgtacccatgattttttcaggattagctggccaaatgacattcatagagagggtacacaatatgatatgtatgctttattttgacttttggttccaaacatttagagagaagaaatgggatccattttacagcaaaactttaggaaggcccaccacattagctgagataatgggcaaagcagaaatgtggctcattagatcctactgggatttggagtttccccacccaatatcgccaaatgttgactacattggaggactccactgcaaacctgctaaacccttgcccaaggatattgaagacttcgtccagagctctggagagcatggtgtggtggtgttttctctggggtcaatggtcaggaacatgacagaagaaaaggccaacatcattgcatgggcccttgcccagattccacaaaaggttctttggagatttgacggcaaaaaaccacccaccttaggacccaataccagactctacaagtggcttccccaaaatgatcttcttggtcatccaaaaaccaaagcctttgtaacgcatggtggagccaatggcatctatgaggcgatccatcatggaatccctatgattggcattcccttatttgcagagcaacatgataacattgcccacatggtggccaaaggagcagctgtggaagtaaatttcaggacaatgtcaaagtcagatttgctcaatgcactggaggaagtcatagacaatcctttttataaaaagaatgctatgtggttgtcaaccattcaccatgaccagcctacgaagccactggacagagctgtcttctggattgagtttgtcatgcgccacaaaggggccaagcacctgagatcacttggacataaccttccctggtaccagtaccactctctggatgtgattggattcctactttcctgtgtggcagtcactgtagtccttgctctaaagtgctttttatttgtttatcgattctttgtaaagaaggaaaagaaaacaaagaatgagtagagctcaatgataatgcatcacatgaatgaaatttgttcatcattttaagttatgaaccaccttctaaaaactcattaataactttacagaagcatagcttctttgtaattttgtaccatgtaaaaagacatataattctgaggcttctgatatgtgaccaaagaatcccatcatttattttaattttcaaactattcaatgtaaaacaatttgcctgtgtagaaaaatatataaataaagattgaattc

SEQ ID NO: 1408 - DNA, 1846 bp, Rattus norvegicus
cggatgcctgggaagtggatttctgctctgctcctgctgcaaataagtttctgctttaaatctgggaactgcggaaaggtgttggtatggccgatggaatatagtcactggatgaatataaagataatactagaggaacttgtacagaagggccatgaagtcactgttctgagaccttcagcttctgtctttcttgatcccaaggaaacttctcaccttaaatttgtaacttttcctacatctttcagtagtcatgacctggaaaatttttttacaaggtttgtgagtgtatggacttatgagttgccaagagacacatgtttgtcatattttctttatctacaagatacgattgatgaatattctgactactgtctgactgtttgtaaagaagcagtttcaaacaaacagttcatgacaaaactacaggaatccaaatttgatgtcgttttctcagatgccattggtccctgtggagagctgatagctgaactgctccagattccttttctgtacagtcttcgcttctctcctggctacacaattgaaaagtacattggaggagttctattccctccttcctatgtacccatgattttttcaggattagctggccaaatgacattcatagagagggtacacaatatgatatgtatgctttattttgacttttggttccaaacatttagagagaagaaatgggatccattttacagcaaaactttaggaaggcccaccacattagctgagataatgggcaaagcagaaatgtggctcattagatcctactgggatttggagtttccccacccaatatcgccaaatgttgactacattggaggactccactgcaaacctgctaaacccttgcccaaggatattgaagacttcgtccagagctctggagagcatggtgtggtggtgttttctctggggtcaatggtcaggaacatgacagaagaaaaggccaacatcattgcatgggcccttgcccagattccacaaaaggttctttggagatttgacggcaaaaaacccaccaccttaggacccaataccagactctacaagtggcttccccaaaatgatcttcttggtcatccaaaaaccaaagcctttgtaacgcatggtggagccaatggcatctatgaggcgatccatcatggaatccctatgattggcattcccttatttggagagcaacatgataacattgcccacatggtggccaaaggagcagccgccacagtaaatttcaggacaatgtcaaagtcagatttgctcaatgcactggaggaagacatagacaatcctttttataaaaagaatgctatgtggttgtcaaccattcaccatgaccagcctacgaagccactggacagagctgtcttctggattgagtttgtcatgcgccacaaaggggccttgcacctgagatcacttggacataaccttccctggtacctgtaccactctctggatgtgattggattcctactttcctgtgtggcagtcactgtagtccttgctctaaagtgctttttatttgtttatcgattctttgtaaagaaggaaaagaaaacaaagaatgagtagagctcaatgataatgcatcacatgaatgaaatttgttcatcattttaagttatgaaccaccttctaaaaattcattaataactttacagaagcatattgtaattttgtatcatgtaaaaagacatataattctgaggcttctgatatgtgatcaaagaatcccatcatttattttaattttcaaactattcaatgtaaaacaatttgcctgtgtagaaaaatatataaataaagatttaattgaaaaaaa

SEQ ID NO: 1409 - DNA, 1217 bp, Rattus norvegicus
cagagcctcctcttgtctggacaagatggcaacccttaaggaaaagctcattgcgccagtcgcagacgacgagactgccgtcccgaacaacaagattactgtagtaggcgttggacaagttggaatggcttgtgctatcagcattctggggaagtctctggctgatgagcttgccctggtggatgtcttggaagacaagctcaaaggagaaatgatggatctgcagcacgggagcttatttctccagactccgaaaatcgtggctgataaagattactccgtgacagccaattctaagattgtggtggtgaccgcgggagtccgccagcaggagggggagagtcggctcaacctggtgcagagaaacgtcaatgtattcaagttcattattcctcagatcgtcaagtacagccccgactgcaccatcatcgtggtttccaacccagtggatattcttacctatgtcacctggaagctgagcgggctacctaagcaccgcgtgattggaagtggatgcaatctggattctgctcggtttcgttacctcatggccgaaaagcttggtattcatcccagcagctgccacggctggatcctgggcgagcacggggactccagtgtggcagtgtggagcggggtgaatgtggcaggagtctccctccaggaactgaacccagagatgggaacggacaatgacagcgagaactggaaggaggtgcataagatggtggtggacagtgcctatgaagtcatcaagctaaaaggctacaccaactgggccatcggcctaagtgtggctgacctcatcgaatccatgctgaaaaacctctctcggattcaccccgtgtctacaatggtgaagggaatgtacggcatcgagaacgaagtcttcctcagtctcccgtgcatccttaatgctcggggactgaccagcgtcatcaaccagaagctgaaggacgatgaggtcgctcagctcaggaagagtgcggacaccctgtgggatatccagaaagacctcaaggacctgtgactgccaggcgccaggctgtagaaatccaaacctccaatgtgactaagtgaacctttagtcttcggccttgtacgtaggtcacagtttgcttcttccctaacatgtgataatgagctcacagatcaaaaccaggagtgtttgatgtttgcactaggagctcctgaacaaataaagtttagcaattgca

SEQ ID NO: 1410 - DNA, 1683 bp, Rattus norvegicus
ctcgtgtagcgtagcctccgcgcctctgctgaagccccgcgacctcgccagcagcccttggacatggctatccccatgcgcccgcgcctcctagcggccctcgcgcccacctttctcggcttccttctccttcaggtggccgttggtgcaggcactcctccagggaaagcgtttaatttaacttggatatcaactgatttcaagacaatcttggagtggcaaccgaaacccaccaactatacctacactgttcagataagcgatagatctagaaactggaaatacaaatgcactggaaccacagacactgagtgtgacctcaccgacgagattgtgaaggatgtgaactggacctatgaagcaagggtcctatctgtcccatggaggaactcaactcatggaaaggaaacactctttggaactcatggggaggaaccgccatttacaaatgcccggaagtttttaccttaccgagatacaaaaattggacagccagtaattcagaagtatgaacaaggcggtacgaaactgaaggtgactgtaaaagactcatttacattagtcagaaagaatggtacattcctcactctgcggcaagtttttggcaatgacttgggttatattcttacgtatcggaaagactcaagcacaggaaggaaaacaaacactacacataccaatgaattcttgattgatgtggaaaagggggtaagctactgcttcttcgcacaagccgtgattttctccaggaaaactaaccacaagagcccagaaagcatcaccaagtgcactgagcaatggaagagtgtcctgggagaaacactcatcattgtgggagcagtggtgttcctggtcactgtctttatcatcctgctgaccatatctctgtgcaagcgcagaaagaacagagcaggacagaaaaggaagaacaccccgtcgcgcttggcatagacgaggaggctgacgctgctgactgtcacactgcccacacggcactgttaccgagacctctgctgggaactgtggagtttgctcctagctcagaaagactcccttcatggcctgtcattccagctaatgctttgattccaacactagcatctgtcactttaggacatactgaacggtacaaattgatcaacactacagcaccttttgcacaaagcttaagattgtgtattctacacgcgggaagacactaggttgcccaggcaaagccagtggtcagatgcctttcctataacctgggtgggcttttggagaacctttgaggagtgatgccataggctctagaacaggaaagtgggatttgggtggacttttccaacagttgtacttttcgcaaatcggtatttgggttttgtttttccttctactaggtacttttggaagttcaaagtaactgccaaactgtcatatgttaaatgcaggatatttctgcttgggacatccttgtgatttgtactttattacaacttagcactttaactgacaatgatggggattgaacattggacaaccaactctatttttataagactaccatacagaagaactacatatagttttatgatctaaggtacttaaagtgtttgtggttaacattgtgtatatttatatgagttttaaaggttttgtatatgggattttctatttatatatctcctatttgtatatattgag

SEQ ID NO: 1411 - DNA, 2260 bp, Rattus norvegicus
gggcgactaggaccttgtgcacacagagcagcagcagaaaccggggcgatgctacgggtgcggtgtctgcgcggcggcagccgaggcgccgaggcggtgcactacatcggctctcggcttggaggatccttaacaggatgggtgcagcgaactttccagagcacccaggcagctacagcttcctcccaaaattcctgtgcagctgaagacaaggccacccaccccctgcccaaggactgccctgtctcctcttacaacgaatgggaccctttagaggaagtgatagtgggcagagctgaaaatgcctgtgtcccaccattcacagtggaggtgaaggccaatacatatgaaaagtactggccgttttaccagaaaaatggaggtctttattttcccaaagatcatctgaagaaggctgttgccgaggtcgaagagatgtgcaatattttatcaatggaaggcgtgaccgtgaagcggcctgaccccattgactggtcactgaagtataagactcctgattttgagtctacaggtttatacagcgcgatgcctcgagacatcctgatggttgtggggaatgagattatagaggctcccatggcatggcgctcacgcttctttgagtaccgcgcatacaggtcaattatcaaagactacttccaccgtggtgccaagtggacaacggcccccaagcccacaatggctgacgaactgtatgaccaggactatcccatccattctgtggaagacagacacaaattggccgctcaggggaagttcgtgacaaccgagttcgagccttgctttgatgctgctgacttcattcgagctggaagagatatttttgcgcagagaagccaggttacaaactacctgggcatcgagtggatgcgtaggcatcttgccccagactacagagtgcatatcatctcgtttaaagaccccaatccaatgcatattgatgccaccttcaacatcattggacctggtcttgtgctctccaaccctgaccgtccatgccatcagattgatcttttcaagaaagcaggatggaccatagttacccctccaacacctgtgatccccgatgatcatcccctctggatgtcatccaagtggctctccatgaacgtcttaatgctagatgagaagcgcgtgatggtagacgccaatgaggtcccaattcagaagatgtttgagaagctgggtatcagcaccattaaggttaacattcgaaatgccaattccctaggaggaggcttccactgctggacctgcgacgtccgccgccgaggcacccttcagtcctactttgactgagcggccgtggtgtggcttggggcatagcctcagatatacctaagaagcagcaaggcccttctctcgctttaataaatgcatgaactgtagtgctttgaacaatcacctccttaacagggttcccaaacctgggttactttttgttgacataaggaaggataacttttgataggtcttactttcttctcctaaagttatttacaatttggcttcaaatataaaagttgagtaaatgtataccagggcagaaattagtcatttgagtaacttggccgctaatatttaaccatctacctctgtttttaatcttctttcctaaaggcagcttgaaatgtcggtcctaaccttgtcttcttttcctctttggtggacttgtgaatgttcatattacttcaaagacttaggagaaaaacacagaccctaagtagaaccagatatttgtctatttttcaaaaataattggatgttttttaaaattttgtttttaaataacctagactatgcaaacactggaaaaaaaatgaagtaacttttccatgaatgcttttaacattcttgtgtcaccatttggtactaaactctagtcctgcctcttacctcatttcaagtgggttttcctcccttccttccttccttcctcccttccttctttccttcctttcttccaaaaacttagagaagtgcttggtttaatagagtgaaacttgtagatcctattcctaaaggttgatgatgttcagtatcaacaggtaaaatggcatctttgttaatctgtcttgtttacatatatgcaaattatttaaggcatagagttttaaagcattttttaaaaactaatgcaggtaaaagaaatacatgtgacatgaaataattttaatgttggatattgtatatgtatttttattctaataaagttttgtgttccagattggaaaaaaaa

SEQ ID NO: 1412 - DNA, 1097 bp, Rattus norvegicus
agctccagagatggctaccgcgatgacagtttccagcaaactcctcggcctgctgatgcagcagctgagaggtacccgccagctgtacttcaacgtcagccttcgatctctgagctcctctgcacaagaggcgtccaaaagaatccctgaggaagtctcagaccacaactacgagtctattcaagtaacatctgcccagaagcatgttctgcatgtacaactaaaccggccggagaagaggaatgccatgaacagggctttctggagggagttggtggaatgcttccaaaagatatctaaagactccgactgtcgggctgttgtggtctctggtgcaggaaagatgttcacttcaggtattgacctcatggacatggcatcagacatcctgcagcccccaggagacgatgtggcccgcatagcctggtacctccgagacctcatcagccgataccaaaagactttcactgtcattgagaagtgccccaagccggtgatcaccgcaattcacggaggctgcattggtggaggcgtggatcttatttctgcctgtgacattcgctactgcactcaggatgctttcttccaagtcaaggaggtggatgtgggcctggctgctgatgtaggaacgctgcagcgactgcccaaggtcattgggaaccggagcctggtcaacgagctgaccttcaccgcccgcaagatgatggctgacgaggccctggacagtgggctggtcagccgcgtgttcccagataaggacgtcatgctgaatgcagcctttgccctggcggccgatatttccagcaagagtcctgtggctgtgcaggggtcaaaaatcaatttaatctactcccgagaccattctgtggacgagagccttgactatatggccacttggaacatgagcatgctgcagacccaggacatcatcaagtcagtccaggcagccatggagaagaaggactcaaaaagcatcaccttctccaagctctgagtgccttcctgaccctggtcccctcagtgcctcctcccggtgtataactttatgacttagttcttcagttcccggggccttatctccactgtgaacaataaag

SEQ ID NO: 1413 - DNA, 2098 bp, Rattus norvegicus
gaattcgggaatgtcatggatccagtgagacagatccagtgcgaccgtgaaggcaaacgctttccgttcctctcagctccaccagcttccacgtcctcgcccgaccgcgccatggagggttaccataagccagatcagcagaagctccaggccctgaaggacacagccaatcgcctgcgcatcagctccatccaggccaccaccgcggcaggctcgggacaccccacatcatgctgcagcgctgccgagatcatggctgtcctgtttttccataccatgcgctacaaggccctggatccccgaaaccctcacaatgatcgctttgtgctctccaagggccatgcagctcccatcttatatgcagtctgggctgaagctggcttcctgcctgaggcagagctgctgaacctgaggaaaatcagctctgacttggatgggcatcctgtcccgaaacaagccttcaccgatgtggccactggctccctgggccaggggctgggagctgcgtgcgggatggcatacacaggcaaatacttcgacaaagccagctaccgagtctattgcatgctgggagacggggaggtgtccgagggctccgtttgggaggccatggccttcgctggaatttacaagctggacaacctcgttgccatttttgacatcaaccgtctgggccagagcgacccagccccgctgcagcaccaagtggacgtctaccagaagcgctgtgaggcctttggctggcacgccatcatcgtggatgggcacagtgtggaggagctgtgcaaggcctttggtcaggccaagcaccaaccaacagccatcattgccaagaccttcaagggccgcgggatcacagggattgaagacaaggaggcgtggcatgggaagcccctccccaaaaacatggctgagcagattatccaggagatttacagccaggttcagagcaaaaagaagatcctcgccacgccccctcaggaggatgccccttccgtggacattgccaacatccgaatgcctaccccacccaactacaaagtgggggacaagatagccacacggaaagcctatggattggcccttgccaagctgggccacgccagtgaccgcatcatcgccctggatggagacaccaaaaattccaccttctcagagctcttcaaaaaggagcacccagaccgtttcatcgagtgctacattgctgagcagaacatggtgagcattgctgtgggctgtgccacacgtgacaggacagtgcccttctgcagcacttttgcggccttcttcacacgcgccttcgaccagatccgcatggccgccatctccgagagcaacatcaacctttgtggctcccactgcggcgtgtccattggggaagacgggccctcgcagatggccctggaagacctggccatgtttcggtcggtccctatgtccaccgtcttttacccaagtgatggagttgccacagagaaggcagtggaattagcagccaatacaaagggcatctgcttcattcggaccagccgcccagaaaatgccattatctatagcaacaacgaggatttccaggttggccaagccaaggtggtcctgaagagcaaggacgaccaagtgacagtgatcggggctggcgtaactctgcacgaggctctggctgctgcagagatgttgaagaaagagaagatcggtgtccgtgtactggaccccttcaccatcaagcccctggacaaaaagctcattctcgactgtgccagagcaaccaaaggcaggatcctcaccgtggaggaccactactatgaaggtggcataggcgaggcagtatctgctgtggtagtgggcgaacctggagtcacagtcactcgcctggcggtcagccaagtaccacgaagtgggaagccagctgagctgctgaagatgtttggtattgacaaagacgccattgtgcaagctgtgaagggccttgtcaccaagggctaggaaggacatgggatgccgggtgggtgaactacacattccagggatgttctggcaaaggtgctcaagggtgtaccgagtggaaaggtaaatatatgttttgagaaaaaccgaattc

SEQ ID NO: 1414 - DNA, 4595 bp, Rattus norvegicus
cagaaggcggctgaatgggaggcagctttgggaatcattctgaagattacatgggagaccacatatcaacattacagcaggaatccagctatcgggtcgtctagatccaaaaccaagtgctcggtattgtaaccctacgattctctattttgaagcagaagtaggttaaaacaccaaccactgtaaaataggtagttcaaagtagattttggaagatgtcagtcaacatcccttccaactcagtgcccagtggtgccagtcgtttccaagtccatgttataaatgagggccatggcagtggtgcagccatgagtgacagcacggaccccccacattatgaagagacctctttcggggatgaagcccaaaacagactgaaaatcagctttaggcctgggaatcaggagtgctatgaaaattttctccaaactggagagactgctaaaacagacaccacgtttcacgcctatgactctcacacaaacacatattacctacaaacctttggccacaacaccatggacgccgtccccaagattgagtactaccgcaacaccggcagtgtgagcgggcccaaggtcaaccggccgagcctgcaggagatccacgagcagctagctaagaatgtggctgtggcccctggttcagctgacagggttgctaatggagatgggatgcctggagatgagcaagcagaaaacaaggaagaagacgtgactggtgttgtgaagtttggatgggtgaaaggtgtgctggtgaggtgcatgctgaacatctggggagtcatgctcttcattcgcctctcctggattgtaggagaagcgggaattggtctgggagtcatcatcattggcctgagcgtggtagtgacaacactcacaggtatctctatgtctgctatttgcacaaacggagtggtgagaggaggtggagcctactacctgatttcccggagcttagggcctgagttcggtgggtcaataggcttgatttttcgtttcgccaatgcagtgcgtgtcgctatgtatgtggtggggttcgcggagactgtggtagaccttcttaaggagagtgattcaatgatggtggatccaaccaatgacatccgaataatcggttccatcacggtggtgattcttctagggatctcagtagctgggatggagtgggaagctaaggctcaagtgattctcctggtcattctactcattggtatcgcaaacttcttcattggaactgtcatcccatccaacaacgagaagaaatccagaggcttcttcaactaccaagcatctatatttgcggaaaactttgggccaagcttcacagagggagaaggcttcttctcggtctttgctatctttttcccagctgctactgggattcttgctggtgccaacatctctggagacctggaggatccccaggacgccatccccagagggaccatgctggccattttcatcaccaccgtcgcctacataggtgttgctatttgcgtacgtgcctgtgtggtccgagacgccactgggagcatgaacgacactgtcgtttctgggatgaattgcaatgggtccgcagcctgcggactgggctacgacttctcaagatgtcagcatgagccatgccagtatgggttgatgaacaattttcaggtcatgagcatggtgtccgggttcggccccctcatcaccgcagggattttttcggcaacactgtcttcggccctagcctccctcgtcagtgcacccaaagtattccaggctctgtgcaaggacaacatcttcaaaggacttcagttcttcgcaaagggctatgggaaaaacaacgagcccctgagagggtacttcctcacttttgtgatagccatggcattcattctcatcgccgagctgaacgtcattgcacctatcatatccaacttcttcctggcctcatatgcgcttattaatttctcctgcttccatgcctcgtatgccaaatcgccaggatggaggccggcatatgggatttacaacatgtgggtatctctcttcggagccattttgtgctgtgcagtcatgtttgtcatcaactggtgggcggctgtcatcacctatgtcattgagctcttcctctatatctatgtgacttataagaagccagatgtgaactggggctcctccacacaggctctgtcctacgtgagcgctttagacaatgctctggaattaaccacagtggaagaccatgtgaaaaacttcagaccccagtgcattgtcttaacaggaggacccatgacaagacctgctctcctggacataacccatgcctttacgaagaatagtggcctctgtatctgctgcgaagtcttcgtgggacctcgcaagctgtgtgttaaagagatgaacagtggcatggctaaaaagcaggcctggctgatgaagaacaaaatcaaggctttttatgctgcggtggcggcagactgcttcagggacggtgtgcggagtctccttcaggcctcaggcctggggagaatgaagccaaacactctagtgattggatacaaaaagaactggaggaaagctcccttgtctgagcttgagaattacgtgggaatcatacatgacgcctttgactttgagattggtgtagtcatagtcagaatcagccaagggtttgacatctctccagttctccaggtacaagatgaactggagaaactggaacaggagagactggctctggaggccgcaatcaaagacaacgactgtgaggagggcaaggggggcatccgaggcttgtttaagaaggccggcaaactgaacattaccaagccggcccctaaaaaagacagcaacatcagcaccatccagtcgatgcacgtcggggagttcaatcagaagctggtagaagccagcgctcagtttaaaaagaaacagggaaaaggcacgatcgatgtttggtggttatttgatgatggagggttgacactgcttatcccatatatcttgactctcagaaagaaatggaaagactgtaagttaagaatctatgttggaggaaaaatcaaccgcattgaagaggaaaaaatttcaatggcttctcttctcagcaaatttaggataaaatttgcagacattcatataattggagacatcaacattaagccaaacaaagagagctggaaagtctttgaagagatgattgaaccttataggctccacgaaagccacaaagatttgaccactgctgagaaattaaaaagagaaagtccatggaaaattacagatgcagaactggaagcagtcaaggaaaagagttaccgccaagttcgactgaacgagctgttacaggagcattccagagccgccaacctcatcgtattgagccttccagtggcgagaaaaggatctatttcggatttgttgtacatggcgtggttagaaatcctgaccaagaacctccctcctgtgctactggttagaggaaatcacaagaatgtcctgacattttactcttaaagcgcgagggatgagaaatgttgtaccttggtgtccgaataattacaaaacgtgtctggtactttgtgttttaaaacctcatctatgaatatacaaacctctggagactatcccacctgattctacataaatttcatcttttttaaaaaagttattattaatgagagttttttcccaccagttttaaaaacatcgaaaacatttttcccttgtcgctggtgaataagaaattaataagagctggctgacatgcttgcaggatgtgctaatgtagatgagctccaggcaaacgcaatctcttgtttccgtggattcttctgcatggccccgtgcaggccacaggcccatagcgggctctctttaagttgttattgacagactggtgtggtgaaagcaggcggctatcatagggaaagacacactgggtcagtggcctgattctgcttggcctcctgagaagtttgtggagatttaaaaatcaatatccggaaactgtaagaaggactagagtctacaaagtgttcaaagcagttacctaaattaaggtttatttaatgcagccgataataagcttaacctctgatcacacgtagcttcgattcgctgctagccagaggtacactaggtaggtgagcaaagacacatgttccacttagacgaaatagagtcccaacatacaaatatcaattgtcttcctggttaaatgttttgaaatttctaccttaatactactttatcttttttctctgattaagtggtttgcatagacgaaataaaaatagacgatctcattgaaaaataatctcacaggtttccaatccactactaaaaatatatccagatcctacatttatttacttctctatatacaggtatatgggttttatagaataacaaggatataagtggagaacttgtaaaaatttttaaaaaccacaggtgttgatttttcttcttgttcgtgtgtgtataatatttaatcacagaaaaaatgcttatatgataaatggcttggttttggttttgttggcatattttgactgttctggggaagcttgtggggggcaaatcaacctgaaataaaattctact

SEQ ID NO: 1415 - DNA, 4361 bp, Rattus norvegicus
cccggagccataatggcagagctacccgtgacagagatgccaggcgatgctctgtgcagtgggcgcttcaccatcagcacgctgctggggggtgacgagcccccaccagctgcctgtgacaatagccagcccagccatttgacccatggcagcaccttgtacctacgcacctttggttacaacactatagatgtggtacctgcctacgaacactacgctaacagcgctctgcccggcgagccccggaaggtgcggcccaccctggctgacctgcactcgttcctcaagcaggaaggtagccacctgcatgccctggcctttgatggacggccaggccatgagctgactgatggacttgtggaagacgagacaggcgccaacagcgagaagagccctggagaacctgtgcgtttcggctgggtcaagggagtgatgatccgatgcatgctcaacatatggggtgtgatcctctatctgcggctgccctggattacggcgcaggcgggcattgtcctgacctggctcatcatcctgctgtcagtcatggtgacatctatcaccggcctctctatctcggccatctccaccaatggcaaggtcaagtcgggtggtacctatttcctaatttctcggagtctgggacctgagctggggggctccattggcctcatcttcgcctttgccaatgccgtgggtgtggccatgcacactgtgggctttgcagagaccgtacgagacctacttcaggagaacggcacacccattgtagaccccatcaatgacatccgcatcatcggtgtggtcacggtcactgtgctgctggccatctcgctggctgggatggagtgggagtccaaggcccaggtgctgttctttcttgtcatcatggtctcttttgccaactacctggtgggcacgctgatcccagcatctaaggacaaagcctccaaaggtttctacagctaccatggggacatttttgttcagaacctggtacccgactggagaggcatcgatggtagcttcttcgggatgttctccatcttcttcccttcagccacaggcattctggcaggggccaacatctctggggacctcaaggaccctgctgtcgctattcccaagggaacactcatggccattttctggaccaccatttcctaccttgccatctcggccaccatcgggtcctgtgtggtgagggatgcctctggggacgtgaacgacaccataactcctggcccaggcctctgtgaagggctagcctgcggttatggctggaacttcacggaatgctcccagcagcacagctgccgctatggcctcatcaactactaccagaccatgagcatggtgtctgccttcgcacccctgatcacagccggcatctttggggccaccctgtcctcggccttggcctgtcttgtctcagctgccaaggtcttccagtgcctgtgcgaagaccagctgtaccctctgattggcttctttggcaagggctatgggaagaacaaggaacctgtgcgtggctacttgctggcctacgccatcgcggtggccttcatcatcattgctgagctcaacaccatcgctcccatcatttctaacttcttcctctgctcctacgccctcatcaacttcagctgcttccatgcctccatcaccaactcacctggatggagaccctccttccgatactacagcaagtgggcggcgctgtttggggcagtgatctccgtggtcatcatgttcctgcttacctggtgggcagctctcattgccattggagtcgttctcttcctcctgctctatgtgatctacaagaagccagaggtaaactggggctcctcagtgcaggctggctcctacaacctggccctgagctactccgtgggcctcaatgaggtggaagaccacatcaagaactatcgcccccagtgcctggtgcttacaggaccccccaacttccgcccagctcttgtggactttgtgagcacgtttacccagaacctaagcctgatgatctgtggccacgtgctcattgcacccggcaaacagagagtgccggagctccggctcatcgccagcggacacaccaagtggctgaacaagaggaagatcaaggccttctactctgacgtcatagctgaggacttgcgcagtggcgtccagatcctcatgcaggcctcgggtctgggaagaatgaaacctaacattctggtggttggcttcaagaagaactggcagtctgcccacccagccacactggaggactacattggcatcctgcacgatgcctttgacttcaactacggggtgtgcatcatgaggatgcgtgaggggctcaatgtctctgaggcgctgcagacgcacacagccccagaggcactggtacaggaggagcagaccagcaccatcttccagtcggagcaaggcaagaagaccattgacatctactggctgtttgacgatggaggcctcaccctcctcatcccttatctcctgcaccgcaagaagagatggggcaaatgcaagatccgcgtgttcgttgggggccagatcaacaggatggatgaagagagaaaggcgatcatttctctgttgagcaagttcagactgggattccatgaagtccacgtccttcctgacatcaaccagaagccccaggtggagcacaccaagcggtttgaggacatgattgcccccttccgtctcaatgacggcttcaaggacgaggccactgttgccgagatgaggagggactatccctggaagatctcagacgaggagattaataagaacagaattaagtcccttcggcaggtgaggctgaatgagattctcctggattactcccgggatgctgctctgatcatccttaccttgcccattggaaggaaggggaagtgccccagttcactgtacatggcctggctggagaccctgtcccaggacctcagtcctcccgttctcctcatccgaggtaaccaggagaacgtgctcaccttttactgccagtgatgtccagtgtggcagttcctgccgagagctgagcgcgtgggatagagtcggaactcacgctctccagctggagaagaggcttcaattcctgctgtgtcatcacatctaccggctgtgtttccaagctggctgcaccccatcagacacaccttctagaccttgaagttgcacggaaaagcttctggaagagtcttatctctttttaaaaagcttttcttttttttttttttttgtcttgatgaccgaaatattagtcattgattcagtctttgatttgtatacaaatcgagtcccagtattgggtgtgcaacttgacaatctctctcgggaccttccctgtgaccacccccaaagctgtctcatcccccccagacaggagagcaggagcccatcctgaggacccatgtggagttctgatgaccacaggaccctttgagctacacagcaacacacatttctcctcctgttccctttcagtgatggatcctgggtgctcctactagttatttagaccagggtcctctgggttctttgattacaaattctatggtttcctcagagactcagaacacacagaacaatggtagggaagcatcacaaactggtcctcactctcgagggtgcttctctcccctctctcccctctccccccccctccctctctctctcctttttccttctgacagagtcttatgtggtccaggctggccttgaacttgttctgtagtcaagaatagcttcaaacatctgatcccctgcctccattacagagcacagggattccaggcacattcacataggcatgtttcacgaggtgatagggaccacacctacggttgatgggtgccggcaatcacctgctgactatgctacccccgcccagtctctagtgtgctcctttgaagttgattgcaaccttctaaatgatcttcaaacccactcgtgtgcagtgacccgtgctttgaaaaacaggtttaatttctggaggttgtgtgtagggtctgttgctggttggtttctttgttgctcgggaattttgttttgtcaacttgacaggagctagggccatctaagcagaaggaacctcaattgacaaatgcctcctgctgattggcggcctgtaatgattgacggggtggggccagcccactgtgttgccgtaccaccatgagcaggtggtcctggggtgtataagaaagcaggctgagcaagctatgggagcaagccagtgaggagtgtctcttcatggcttctgcttcagttcctgcctggagttccttccctgacttctcttcattataaaccgtaagccatgagatgaaataaacccttttctcccc

SEQ ID NO: 1416 - DNA, 2401 bp, Rattus norvegicus
cctgacgctgccttctcactgcagataagtgagtagtacaggaccctctcccctctctatgcagccctgtgtctgtgagtgcccagggagcaggcatttaccaggtctggtggctgcgtgttccacacgtcctcatgaggctgaagagccaagcacatggcagacaacacacagaggcaaagagagtccatttccctcacgcctatggcccacggcctggagaacatgggggcagaattcctggaaagcatggaggaaggccgactccctcacagtcactcaagcctgccggagggtgaaggtggcctgaacaaagcagagcggaaggccttctcccgatggaggagtctgcagccgactgtgcaagcgagaagcttctgcagggagcaccggcagctgtttggatggatctgcaaaggcctgctctctactgcatgtcttggcttcttgatggtcgcctgcctcctggacctccagagggccctagcactgttgatcatcacctgtgtggttctcgtctttctggcctatgatctgctaaagaggcttctggggtccaagctgaggaggtgtgtgaagtttcaaggccattcttgcctgagcctctggctgaaaagaggtctagcccttgctgctggtgtgggcctgatcttgtggctatctctggacaccgcccagcggcctgaacagctggtgtcctttgcagggatctgtgtgttccttgtccttctctttgctggctcaaagcatcaccgtgcggtgtcatggcgagctgtgtcctggggccttgggctgcagtttgtgcttgggctcttcgtcatcagaacagaaccagggttcattgcattccagtggctaggggatcagatccaggtcttcctgagttacaccgaggcaggctccagcttcgtcttcggagaggctctggtgaaggatgtctttgcctttcaggttttgcccatcatcatcttcttcagctgcgtcatgtctgttctgtactatctgggcctcatgcagtgggtgatcctgaagattgcctggttgatgcaggtcaccatgggcacctcagccaccgagacactgagtgtggcgggaaacatctttgtgagccagactgaagctcctctgctgatccggccctatctggcagacatgacactctctgaagttcacgttgtcatgactggaggctatgctaccattgctggcagcctcctgggcgcctacatctcctttgggatcgacgctgcttccttaatcgcagcctctgtcatggccgccccttgtgcgttggctctctccaagctggtctacccagaggtggaggagtccaagttccggagtgagaatggcgtgaagctgacctatggagacgctcagaacctcttggaagcagccagtgctggggctgccatctcagtgaaggtcgttgccaacattgctgccaatctgattgccttcctggctgtactagccttcgtcaatgctgccctctcctggctaggggacatggtggacatccagggactcagcttccagctcatctgctcctacgtcctgcggcctgtggccttcttgatgggtgtggcctgggaggactgtccggtagtggctgagttgctgggcatcaagttctttctgaatgagtttgtggcctatcaagagctttcccagtacaagcaacgacgcctggcaggggctgaggagtggcttggtgacaagaaacagtggatctctgtcagagcagaaatcctgactacatacgccctctgtggatttgccaacttcagctccatcggcatcatgttgggaggcctgacctccctagtcccccagcggaggagcgacttctcccagattgtactccgggcactgatcacaggggctttcgtgtccctgctaaacgcctgtgtggcagggatcctctatgtacccaggggggtcgaggtggactgcgtgtcccttctgaaccaaactgtcagcagcagcagctttgaggtttacctgtgctgccgccaagtcttccagagcactagctcggagttcagccaagtggcactggacaactgctgtcgattttacaaccacacagtctgcacatagctgggacggagcatcttcctagcctcagggctcatccagcccagagaggccgtgggactcgtcactacctccatcccacaattgggaagggtgcaacggtcatcgctgctcccatgtctgcctctccaagtacgagttcccagagtctggtctgctctcctgccctttgggagccaacattctggtcctcttgagtcctctttccttgggaacctcatgtgcaccagccaaaagcctcctccctgctccctcccaagcacccagcttgttgggtatccccccaaaagctgtctctaga

SEQ ID NO: 1417 - DNA, 4113 bp, Rattus norvegicus
cgggactctccaggccggctcaggcaccggactgtaggtgtatttggagggatttggaggctggagaccccaggaagcacgcaggcgggagcaggcaaggggcggagccccgggcccggccaaggtggccgtcagagggtctgcggggaggcagtagcttgacccaaggcgaccagggaacttcagacggtagcacgccactcaaacaaattaacttgacatcgcaagctgggcgggctggtacgacatcctgacttcagcatccagctgttcctgggcagacagagggccaacaggtgttcctgtggaagaagccaggacaaggactccagaaaacatctcgggcagcctctacatgatgtcacttctcaggactcgaggaccagccaccctacacctctactacagagaaggcagaaatggagacccaaaggccatcactcctgctctgtcactaaccactctgtaatcatgtctccccaccagaaggtgtgaaccgcaccagggccgtggagttctcgggctcccaatccactgacacctttacctgtcccctgaagagaaggcaacgctatggcatcgtacagctgctgtttggccctattggctcttgcctggcactcctctgcctatgggcctgaccagcgagcccaaaagaagggggacattatcctaggaggtctctttcctatccattttggagtagcagccaaagatcaagatctgaagtcaagaccagagtctgtggagtgcattaggtataacttccgtggattccgatggttacaagccatgatattcgccatagaggagataaacagcagcccctcccttcttcccaacatgacactgggatataggatatttgacacctgtaacaccgtctccaaggcgctggaagccaccttgagttttgttgcccagaacaaaatcgattctttgaacctggacgagttctgcaactgctctgagcacatcccttcgaccattgccgtggtgggagccaccggctccggtgtctccacggcggtagccaacctgctgggacttttctacatcccccaggtgagctacgcctcctccagcaggctcctcagcaataagaaccagtacaaatccttcctccgcaccattcccaatgacgaacaccaggcaaccgcgatggccgacatcatcgagtacttccgctggaactgggtgggcacaattgcagctgatgacgactatggcagacctggcattgagaagttccgagaggaagccgaagagagggatatctgcattgattttagcgagctcatctcccagtactctgacgaggaagagatccagcaggtggtcgaagtgatccaaaactctacggccaaggtcattgtcgttttctccagcggcccggacctagaacctctcatcaaggagattgtgcggcgtaacatcacaggcaggatctggctggctagcgaggcctgggccagttcctcgctgattgctatgcctgagtatttccatgtagtcgggggcaccattgggttcggtctgaaggctgggcagattccaggcttcagagaattcctacagaaagttcatcctaggaagtctgtccacaatggttttgccaaagagttttgggaagaaacttttaattgccacctccaagaaggcgcaaaaggacctttacctgtggacaccttcgtgagaagtcacgaagaaggtggcaacaggttactcaatagctctactgccttccgacccctctgcacaggggatgagaacatcaacagtgtggagaccccttacatggattacgaacatttacggatatcctacaatgtgtacttagccgtctactccattgcgcatgccctacaagatatatacacctgcttacccggaagagggcttttcaccaacgggtcctgtgcagacatcaagaaggttgaggcctggcaggtcttgaagcacctacggcacctgaacttcaccaacaacatgggggagcaggtgaccttcgatgagtgtggtgatctggtggggaactattctatcatcaactggcacctctccccagaggacggctccattgtgttcaaggaagttgggtactacaatgtgtatgccaagaagggagaaagactcttcatcaatgaggagaagatcttgtggagtgggttctccagagaggtgcctttctccaattgcagccgggactgtcaggcagggaccaggaaggggatcatcgagggagagcccacctgctgctttgagtgtgtggagtgtcctgatggagagtacagtggagagacagatgcgagtgcctgtgacaagtgcccggatgacttctggtccaatgagaaccacacttcttgcattgccaaggagattgagtttctggcgtggaccgagccctttggaatcgctctcactctctttgcggtgctgggcattttcctgaccgcctttgtgctgggtgtcttcatcaagttccgaaacacacctatcgtcaaggccaccaaccgagaactgtcctacctcctgctcttctccctactctgctgcttctccagctccttgttcttcattggggagccccaggactggacgtgccgcctgcgacagcctgctttcggcatcagctttgtgctctgtatctcgtgcatcttggtgaagaccaatcgcgtcctcctggtatttgaagccaagatacccaccagcttccaccggaagtggtgggggctcaacctgcagttcctgctggttttcctctgcaccttcatgcagatcctcatctgcatcatctggctctacacggcgcccccctctagctaccgcaaccatgagctggaagacgaaatcatcttcatcacgtgccatgagggctcactcatggcacttggctccctgatcggctatacctgcctgctggctgccatctgcttcttctttgccttcaagtccaggaagttaccagagaacttcaacgaagccaagttcattaccttcagcatgctcatcttcttcatcgtctggatctccttcattccagcctatgccagcacctacggcaagtttgtctctgccgtagaggtgatcgccattttggcagccagctttggcttactagcctgcatcttcttcaacaaggtctacattatcctcttcaagccttcccggaacaccattgaggaagtccgctccagcaccgcagcacatgctttcaaagtagcagcccgcgccactctacgccgtcccaacatctcccggaagcggtccagcagccttggaggctccaccggctccattccctcctcctccatcagcagcaaaagcaacagcgaagaccggttcccgcagccagagaggcagaagcaacagcaaccgctgtccctgacccagcaagaacagcagcagcagcccctgaccctccacccacagcaacagcagcagccacagcagccgagatgcaaacagaaggtcatcttcggcagtggtacggtcaccttctctctgagttttgacgagcctcagaagaatgccatggcccacaggaactccatgcgtcagaactccctggaggcccagaggagcaacgacaccttgggcagacaccaggccctgcttcccctacagtgtgcagatgcggactcagaaatgaccattcaggaaacgggcctgcaagggcccatggtgggggaccaccagccagaaatggaaagctcagatgaaatgtccccagcgctggtcatgtccacctctcggagcttcgtcattagtggtggaggtagctctgtgacggaaaacgtattacactcctaatggagggaaaggctatccagttgagaggtttttcttagagccctgagcaaaaggatgggtccttcctttcttcccaggaagccagggagagtaggtacgtcaaagcctgtactcagttgcactgctttgaatgacagtgaactgactggtgtgctctttagagttaaaagaagagccatgttttggggtcgttttccagagctcagtatcacacctgggtttgctgaagtcttttcctctgctctatccaccatcagttcagacgaaagcaaggctctaagctacccatctgcttccctc

SEQ ID NO: 1418 - DNA, 2207 bp, Rattus norvegicus
gtctcccggctgtgcttggccgtgcggagggccggtgccagcacctccagctccgggacagcagcgggagccaagcccgagccgcaggcgtcgtcgccatgcgctggttccgggcgctgttgaagaatgcgtccctggcaggggcgcccaagtacatcgagcacttcagcaagttctccccgtccccgctgtccatgaagcagtttctagacttcggatccagcaatgcctgcgagaaaacttcattcaccttcctccggcaggagctgcccgtgcgcctggccaacatcatgaaagagatcaacctgcttcctgaccgggtgctgagcaccccctcagtgcaactggtgcagagctggtatgtccagagtctgctggacatcatggaattcctggacaaggaccccgaggaccaccggaccctaagccagttcactgatgccctggtcaccatccggaaccggcacaatgacgtagtgcccaccatggcacagggagtgttggagtacaaggacacctatggtgatgacccagtctccaaccagaacatccagtactttttggaccgcttctacctcagccgcatctctatccgcatgctcattaaccagcacaccctcatctttgatggcagcaccaacccagcccaccccaaacacattggcagcattgatcccaactgcagcgtgtctgatgtggtgaaagatgcctatgacatggctaagctcctgtgtgacaagtattacatggcttcccctgacctggagatccaggaagtcaatgccaccaacgccacccagcccattcacatggtctacgtcccctcccacctctaccacatgctctttgaactcttcaagaatgccatgcgggccacagtggaaagccacgagtccagcctcactctccctcccatcaaaatcatggtggccctcggtgaagaagatctgtccatcaaaatgagtgaccgaggcgggggtgtccccttgaggaagatcgagaggctcttcagctacatgtactctacagctcctacaccccagcctggcactgggggtaccccgctggctggctttgggtatggactccccatttcccgcctctacgccaagtacttccagggggacttgcagctcttctctatggagggctttgggacagatgctgtcatctatctgaaggccctgtccacggactcagtggagcgcctgcctgtctacaacaagtctgcctggcgccactaccagaccatccaggaggccggtgactggtgcgtgcccagcacagagcccaagaacacatcgacgtatcgggtcagctaggggccttctcttcctggcacctgggaggatgctgccacctctgaatccagccaccacagggacttccctatctatcccctggggtacgggggtgaaactgggtctccccgatggccagatctgtctttgtagaaatcgcagtggcccatctgtggcgatccctaagtgccaatctgtctctatggagaaacctagggggtttccctggagcctggtctccatggtgatgatgcttgagggttggggacggctctacctggtggggtggccccagagacacttctcccaagaccagagctgtctgttttctaccagaaaccctgggtccccctcactgcctgcatagtcctggtctcccacgtggctgcctcgcttgccttatgcccacaccctgtacaggcacattgggctggtttcttcgtcagtagtaagaaagatggagagagactggggaaacgggggccaaccttgtctctggtcctgcagcctctctccatctccactctggacactaaagttgccactgggaacttgagaatgggtggccgttctcacccaaggcccaccgagaaggcctaagagtaacctgtccccaaggcgatcttagcaatgtttctgccgcttcctggcctggcatgtcctcacgtgtatacctcccctgcccagtgtacgctcaccctatccctgcttgagctttagaccccagacttcctatgcccactatgtgtgcacagacgactcaaacccaggatgccccatgtacatagccagttttgtaatctcagatgcctcacccttgccctccgcacacaggggttaaagccgtgtgcccctcccagtggctgggatggtgacagtgacatccacagtaaatagatgaaatga

SEQ ID NO: 1419 - DNA, 424 bp, Rattus norvegicus
agccagcgaagtacatggagtttgatctgaatggcaatggagatatcgatattatgtccttgaagcgaatgctggagaaacttggggttcccaagacccatctagagctgaagaaattaattagagaggtgtccagtggctccgaggagacgttcagttactctgactttctcagaatgatgctgggcaagagatctgccatcttgagaatgattctgatgtatgaggagaaaaacaaagaacaacagaagccaactggtcccccagccaagaaagctatttctgagttggcctaatggaggtggatataacacggtgggaccgaggaccttcgtgtcagcagcatgggaagagaagaatcagttgcgagccagactgtcaatgctcaataaataatgctccctagtgcctgaaaaaaaaaaaa

SEQ ID NO: 1420 - DNA, 2336 bp, Rattus norvegicus
tcccagccattcccagggtgacgactcagcatggctcaggcctcagggatggacccacttgtggacatcgaggacgagagacccaaatgggacaacaaacttcagtacctcctgagctgcatcggctttgctgtggggctggggaacatatggcggttcccctacctgtgccatacccacgggggaggggccttcctcatcccctacttcatcgccctggtctttgaggggatcccgcttttctacattgagcttgccattggccagcgcctacggaggggaagcattggcgtatggaagaccatctccccctaccttggtggagtaggcctgggctgcttctcagtgtccttcctggtcagcctgtactacaacaccattctcctgtgggtcctgtggttcttcctcaactccttccaacacccactgccctggagcacatgcccattggatctcaacagaacaggatttgtgcaggaatgccagagcagtggcaccgtgagctacttctggtaccggcagactttgaatattacgtctgacatcagcaacacaggcactatccagtggaagctgtttctctgcctggtggcctgctggacaactgtgtacctgtgtgtcatcagaggcattgagagcacggggaaggtgatctactttacagccctatttccttacctggtgctaaccatcttcctcatcagaggtctgactctgcccggagcaacagagggcctaacttacctgtttactcccaatatgaagattcttcagaattcacgggtgtggttggacgcagccacccagattttcttctccctgtccctggccttcggagggcatattgctttcgcaagttacaatcaacccaggaacaattgtgagaaggacgccgtgactattgccctggtcaacagcatgacctccctgtatgcatccatcaccatcttttccatcatggggttcaaggcatccaatgactatgggaggtgcctggacagaaatattttgagcctcatcaatgagttcgactttccagagcttagcatctccagggatgagtacccatctgtcctcatgtacctgaatgccactcagcctgagagggtggcccgacttcccctgaagacctgccatctggaagatttcctggataagagtgcctcgggcccgggcctggccttcatcgttttcacagaagctgtcttgcacatgcccggagcttctgtgtggtctgtgctcttctttgggatgctgttcacactgggcctgtcgtccatgtttgggaacatggagggtgtcatcacaccactatttgacatggggatcttacccaaaggtgtacccaaggagaccatgaccggggtggtctgctttatctgtttcctctcagccatttgcttcacactgcagtctggaagctactggctggagatctttgacagttttgcagcttctctgaatctgatcatcttcgccttcatggaggtggtgggcgtcattcacgtttatgggatcaagcggttctgtgatgacattgagtggatgactgggcggcggcccagcctgtactggcaggtgacatggagggtggtgagccctatgctgctgtttggcatcttcctgtcctacattgtccttctggctcagtcatcacccagctacaaggcctggaacccccaatatgaacattttccctcaagagaggagaagctctatccaggctgggtacaggttacctgtgtgctcctgtccttcctgccctcactgtgggtccctggaattgctctggctcagctactgttccagtacagacagaggtggaagaacacacatctggaaagtgctctgaagccacaggagagcagaggctgctgagacagagccagggtagatcagggttgggaggaagacctgtgccactccgatgcagcctcattacactctgtctacgactgagaccacgtgattattgctttcctagctttccgtatagtggaagactcatagattcagggcaattgtgtattgcccagtggatgtctgtgtgatgccattcctctgaagctaggtccacagggtgccgtctgcatggacatggcttttccctagaatccatgcagatttgggttgtcccgagtgtacttcattggcacagtggcaagactgtggaaaccttttctctgaatggccttggcattactaattttagaaatccagccctatgctggtcttcaaagaaaagctggaacctgacaggtgggaaacttcttcctcctcccatattatcctggtgttaccatgtctataaagagaccctcgggtgcagataccag

SEQ ID NO: 1421 - DNA, 901 bp, Rattus norvegicus
tccgatgccgtttcaggtctggaatcagcagggtcctctgagccttggcagtgctgatctgctcgtttgcaaaggcgcctgtgtctcagagccggtgtgagaagaagagagaatccttcccgccgccgggagtaatcaagagttttggccggacctttgagtacacatcgggatagtgagaagcccggcgaaaagcacagactatggcgctgaaacggattaataaggaacttagtgatttggcccgtgaccctccagcacaatgttctgcaggtccagttggagatgacatgtttcattggcaagccacaattatgggacctaatgacagcccatatcaaggtggtgtattctttttgacaattcattttcctacagactaccccttcaaaccacctaaggttgcatttacaacaagaatttatcatccaaatattaacagtaatggcagcatttgtcttgatattctaagatcacagtggtctcctgctttaactatttctaaagttcttttatccatttgttcactgctatgtgatccaaacccagatgaccccctagtgccagagattgcacggatctataaaacagacagagacaagtacaacagaatatctcgggaatggactcagaagtatgccatgtgatgctaccttaaagtcagaataacctgcattatagctggaataaactttaaattacttttgagttttataatctttattgagcttctgttacagaaggggtgtgacatttgcccttatggtgagttagtctggatgcgtgttctcagcccgaatgagaagtaaaatcttaacagagcacagaatagaaaggaccttggggatcacttagcccagcccattattttcatggaggaaatgaaaccaaagaaaggaga

SEQ ID NO: 1422 - DNA, 3760 bp, Rattus norvegicus
tgagcgacgagatgaatttcctccgcggggtgatggggggtcagagtgccggaccccagcacacagaagctgagacgattcagaagctctgtgaccgcgtagcttcatctactttactggacgaccgaagaaatgctgtccgtgcccttaagtcactgtctaagaaataccgcttggaagtgggaatccaagccatggagcatcttatccacgtcttacagacagatcgttcggattctgaaataatagcgtatgctttggacacactctataatataatatccaatgatgaagaggaagaagtagaagaaaattctacaagacagagtgaggatttgggaagccaatttacagaaattttcattaagcagccagaaaatgtcactctcctgttatctttgttggaggagtttgatttccacgtccgatggcctggtgtgagacttctgacttctcttttaaaacagctagggcctccagtgcagcaaatcatcctagtcagccccatgggtgtttcaaaattaatggacttgctggcagattccagggaaattatacgtaatgatggcgtcttactactgcaggcattaacaaggagcaacggagcgatccagaaaattgttgcttttgaaaatgctttcgagagactactggacattattacagaggaggggaacagcgatggaggtatagtagtggaagattgtttgattttgctccaaaatttgttaaaaaacaacaattccaatcaaaatttttttaaagaaggctcttatattcaacgtatgaaagcttggtttgaagttggagatgaaaatcctggttggtcagcacagaaagtgaccaatcttcatttaatgctccagcttgtgcgggtactggtgtctcccaccaaccctcccggtgctaccagtagctgccagaaggccatgttccagtgtgggttactacaacagctttgcactatcctgatggctaccggaattcctgctgatatcctgactgagaccataaatactgtatcagaagttattcgaggctgccaagtaaatcaagactactttgcttctgtgaatgcgccttcaaatcccccacgaccggcaatcgttgtgctgctcatgtccatggtcaacgagaggcagccatttgtactgcgctgcgccgtgctctactgtttccagtgcttcctctataaaaacgagaaaggacaaggagagattgtggccactctgctaccttccactattgacgcaacaggtaactcggtctcagctggccagctgctctgcggaggtttgttttccacagactccctctcaaactggtgtgctgccgtggccctcgcccatgcactgcaagggaacgccacccagaaggagcagctgctcagggttcagctggccaccagcatcggcaaccccccagtgtcgctcttgcagcagtgcaccaacattctgtcccagggaagcaagatacagacaagagtcgggttgttgatgttgctttgtacctggttaagcaactgtccgattgctgtaacacactttcttcacaactcagccaatgttccatttcttacaggacagattgcagaaaatctcggagaagaagagcagttggtccaaggcttatgtgcccttcttttgggcatttcaatttatttcaacgacaactcactagaaaactacacgaaagagaaactaaagcaactaatagagaagaggattggcaaagagaattacatagagaaacttggatttattagcaagcatgagttatattccagagcatctcagaaaccccagccaaactttccgagtccagaatacatgatatttgatcatgagtttacaaaactggtgaaagaacttgaaggtgttattaccaaggctatttataagtccagcgaagaagataagaaagaggaagaggtaaagaaaaccttagaacagcatgataatattgtgactcactataagaatatgatccgtgagcaagacctacaactggaggaactaaaacagcaagtgtccacactgaaatgtcagaacgagcagctgcaaacagcagtcacccagcaggcttctcagattcagcagcacaaggatcagtacaacctcctcaaagttcagctcgggaaagacaatcaccatcaaggttctcacagtgacggggctcaggtaaatggcattcagccagaggaaatcagtcggctgagggaagagatagaagaattaagaagtcatcaggtgctcttacagagccagctagctgaaaaggacactgtgattgaaaatttgagatcttcacaagtgtctggcatgagtgaacaggctttagcaacgtgttcacccagagatgccgagcaagttgcagagttaaaacaggaattgtcagcattaaagtcccagttatgttcacagtctctggagatcactagactccagacagagaacagtgagctgcaacagagagcagagaccttggcaaagtcagttcctgtagaaggagagagtgagcttgtgacagccgcaaaaactacggatgtagagggaaggctgtctgccctgctgcaggagaccaaagagttaaagaatgagattaaagcattgtctgaggagaggaccgccattcaaaagcagctggactcctccaacagcaccatcgccatcctacaaacggagaaagacaagctatacttggaagttacggattctaagaaagaacaagatgatcttttggtgctgttggcagatcaagatcagaaaatcctgtcactgaagagtaaactcaaggatcttggtcatccagttgaagaagaagatgaatctggagaccaagaagatgatgatgatgaacttgacgatggtgacagggaccaggatatctagctttaaaccctaggaacaatagagattatgtcattgtgttgaagaagtcttaagacagtgctttggcttgcctccacaaaaaataaagacagaaccaggtggaaagcattcactaataaaattattgatgtatgtttttaatattgccacccatgtgggaaactctgacttcatgtggaagttttatttatgttcttctgaactctcccaaaatttgcagagggcaccaggttccaaaaacacagcatttgaaggcacgtggtggcagtgcagttccttactggttcactggtcggtcgcttgctttcagacagagtctgggccttcagtactaacatttgattaatgtgtattgaacgggaatcactatttctaaatcagcgtttgcattctcggctgattaatccttgtaaagaaaggactgtacttaaagacagggcagccttgaatcaggggtcctgtgtgtcatcacccccttccccactgtgcctccctggtgagcaggatgggacagttcagagtgcttgccgtccagcagggccacctctgcctactgagcggaaagactgtcccggagtgtgaaagcactctgaggagctggaacagtgtattaacgtggctggttttctctctgttaaagctaaagaaggaaacagattatagtcagcagttcatacagctgggattagaattgtttgattatcacaaaacatgttcttagttttacaaaaacccaaactatgatttatgtaatttattggcatttttgctgaataggtgtaagtcagataatagatttttaaaaagcaaatgaagcaatgtgtcaaagtctaatgttttcataataaaaatagatattatgttcactt

SEQ ID NO: 1423 - DNA, 2807 bp, Rattus norvegicus
ccgcgttaaagccggacggagtacttctattgctggcagacctgccccggagcgcgtaaacccgcacgctcgcgccgcccacgtccagctcgcgaatccggaggcgtccggttccaataatgccccggaaggcagctagtccagaggaggcagaaaggatgccgggctctgaagagatagaggctgggcggccgcggccggttttacgctctgtgaactcgcgcgaaccctctcaggtcatcttctgcaaccgcagcccgcgcgtcgtgctgcctttgtggctcaactttgatggtgagcctcagccctacccgaccttaccaccgggcaccggccgccgcatccacagctaccgaggtcacctttggctcttcagggatgcggggacccatgatggacttctggttaaccaaacggaactgtttgtgccatccctcaatgttgatggacagcctatttttgccaacatcacattgccagtgtataccctgaaagagcggtgccttcaggttgtacggagcctggtcaagcctgagaactacaggaggctggacatcgtcaggtcgctctatgaagacttggaagaccacccaaatgtgcggaaagacatacagcggctgacccaagagcacctcgagaatcaggccctgggagaggagcctgaaggagtccactgagattacttggtcctgaatttcggccttgatggtctgaaatcgatctacacataggacaggtcactttctttcggttttaaaatggttcattcttggagtaaaatatccatcatgtaaaagaaagttaactaacatcactgagctttgtagtgtttaagactaaacctgcaaagtgccaccgagtctgccctttctagagcattcatcagaagaagctgttttcagttttgcttcctagtaaggctggatgttcagcataaggatgttagtgtgagcgattcgcgaggagttgctctgtgtcctctaatctgaagaatacagcctcgtatgaacagagccccaccgctcacttggggaaggctgagaaggccctaatgctgggatggacatcctgtagaggcccagtgcctaatgtgtgtggagtcttcagtcagtgttggaggaacaaaccattgggtacttagtgggagagttggagggcctggctctctgtctgaggaaatcttaagtgtacacgtaaaggaacaacttagcagcttctgtttagaaagaactttctcttgagtttccatgtctcagcactttctttctactttgttagtttattttattttatttttgagacttgtgtagcccaggtcagcctcagtcactccggaggggatgctggtcttgaattccggatcctctgggagtgtgtcagcattgggagcacatgggtcgaccacagtctgctctgttcttgcttttcccattttgagacgggctcatactgtagccctgcctggcctcaagctagagtcagccctgtctccccacccagtctggctgcttagactgggtgggcttcccatattcactgccccagacagcagagacgagctgtccttgtgtttaggtctggttttgagagttccttctctgaggaagctgctggcaggagcagggtttctgttccttcccgtcagcccctagcattccagctgggcgccgcactctgctttggcaggcgctagttatgcttcgatgggagaggggagtgaagctccctcagccacacactccaaaccatgggtcccagagcagtctgcaatgagtagtagtttgtgggcagtcacagcttttcttacatattcaaatattgatgttcactacttctatcaaacattttgtagaacataattttttatttgtttttaattcctcagcagagaaaaatgagagaagcttgggcattgtgtgtggcacacaccagaaaggacagtcagctgagagggtgcagaaaggctcttgtgcgctggctctcagctgcatgtagtcctgtaacccagtgttctctctagtacacattttaattggttaaagcactttgtcctggccgagatcataaggtatatacagttttgtggcctgatttttcattgaacttcattgttttgttttcccctctttttcgtttttggttttgtttttggtttgttttttgctttttgttttatcaagatagagtttctctgtgtagcccaggctgtcctggaactccctttgtagaccaaacaactgattactggcctcaaacggagatctgtctgcctctgcctctccagtgctgggattgaagtatgcctaatcttcatctaacttagtaacttgtcttttccatgttactgcacacactgtctaaattccggtgtgctagcctctccctttgagggtgactgttgggagtatttgtctcagtcctgggctccttgagtgcagtctgatgctctaagatcagcaaaatcactgaacttaatactgacactcctgccgccctctcagcgtctctccttagtctgcagcattccgtgagtgaagcggcacaggccagtgtggagcctgtgtgtgggaagtcagcaggtgccgagctattgcaacattggttttattttttaagcctatctctgtctctaaaagatgtaatgtttgtcttatttaactggaagtttgaatactgttctctgtgccttaggacatgagtcacttgtccttgcacatcctgtaagtgtgttcctcagactttgtactctcctttgagttctctgaaaaagctgacctttagtacaataaacggtgctaagtgaagga

SEQ ID NO: 1424 - DNA, 1133 bp, Rattus norvegicus
cctcggctgagctgcattccaatcccagctacatccggagcccagctacattcgagcccagccacatcccgagccaaccttccagaagcaccatgaacccaagtgctgctgtcgttctctgcctcgtgctgctgagtctgagtgggactcaagggatccctctcgcaagaacggtgcgctgcacctgcatcgacttccatgaacagacgctgagacccagggccataggaaaacttgaaatcattcctgcaagtctatcctgtccgcatgttgagatcattgccacaatgaagaagaacaatgagaagaggtgtctgaatccggaatctgaggccatcaagagcttattgaaagcggtgagccaaagaaggtcaaaaagagctccgtaactagagagaagccactcgccacagtgctgagaccgatggacagcagagagacggtctctccacctccctttacccagtgtgcggctagtcctaactgtccctgtttctcctgaccatggtcccatcagctggtactcccactacagcgtgatggacaaggcctggtcctgagacaaaagtaactccagcagcaaggcttcccaattctctaagagctggtccgaatcttccctcaggcagctatgacggctctcctagctctgttccgtaagctatgtgcaggtactaatctcttcagcatgtgccatgccccagcctgctccacacaccctccttctccctagctctaagctcatcagttctgagttcacctgagctcctttatttcaaatgcagtccaggtgagatggcaaatcaagtttgtcagaacaaacttaccaccaccttcccaagggaatttcataactcagaatactcacaggaacctagacatgcatgtttaaatattatttaatgaccgactgtacaaagtggaactcctagatgtattttttgtacgattttcattgtatatgtaagaacttgtgtggttaagtatgtatcaatgggtagttaaagtttacataggcaaatgctttgaatgctacatattacaagatgtgttggatggttttcaaaataaaatgtactgtattgaatgtagtatgagacaaaaaagtaataaagtaataataactgacatga

SEQ ID NO: 1425 - DNA, 1812 bp, Rattus norvegicus
ctcagagatgaggagcagacagctgagagcattaagaaccaaatgacggtgaaggaatgggaaaaggtgtttgaaatgagtcaggaccaaaacctgtaccacaatctctgcactagcctcttccctacgatccacggcaatgatgaagtaaaacgtggcgtcttgctgatgctgttcggtggcgttcccaagacaacaggggaaggaacctctcttcgtggggatataaatgtttgcattgttggggatccaagtacagctaagagccagtttctcaagcatgtggatgagttcagtcccagagctgtgtataccagtggcaaggcctccagtgcttccggcttgacagcagctgtggtgagagatgaggaatctcacgagtttgtcatcgaggctggagcgttgatgctggctgataacggtgtctgttgcattgatgagtttgataagatggacatgcgggaccaagttgctattcacgaagctatggagcagcagaccatatctatcactaaagccggagtgaaggcaactctgaatgccaggacatccattttagctgcagcaaaccctgtcagcggacactacgacaggtcaaaatctctgaaacagaacatcaatctgtcagcgcccatcatgtcccgctttgacctcttcttcattttggtggatgagtgcaatgaggtgacagattatgctattgccaggcgcatagtagacttgcattcgaggatcgaagaatcgatagaccgggtttattcccttgatgatataagaaggtatcttctcttcgcccgacagtttaagcccaagatttccaaagagtcagaggacttcattgtggagcagtacaaacgcctccgccagagggatggctctgggatcaccaagtcgtcgtggagaatcactgtgagacagcttgagagcatgatccgactctcagaatcgatggcccgcatgcactgctgtgatgaggtccagcctaaacatgtgaaggaagcttttcgattactgaataaatcgatcatccgtgtagaaacgcctgacgtcaatctagatcaagaggaagagatccagatggagacggatgagggaccaggaggcatcaatggtcatgctgacagccctgcccctgtgaacgggttcaatggctctggtgaagatgccagtcaggagaccgttcccaagccctcccttaggttggcctttgctgaatactgccgaatctctaacctcatcgtgcttcacctcaggaaaatggaagaagaggaggatgagtcagccctaaagaggagcgagctggtcaactggtacctgaaggaaatcgagtcggaaatcgactctgaagaagagctcataaataagaagaggatcatagagaaggttgttcatcgtctcacacactacgatcacgttctgattgagctcacccaggctggactgaaaggctccagtgaaggaagcgagagctatgaggaagatccttacctggtagtcaacccgaactacttgcttgaagattgagatatagaaggtgacttacggccaggaaccgggggtggcctaccttagccgggacctgggcatgcactgagaccgtttctggagcgatgcttgggggacagttgagaagagacagctgaacagtgagtaatgccgtgatttcatgctggacatgcgtgggtactttgtgcttttcctacacatgaaataaaaagtatttcagaaaacatgattgggatccaacttcaacaggacaagacaaagtgcccacgcatgtgccagcattaaatccacggccatgaactcagc

SEQ ID NO: 1426 - DNA, 6152 bp, Rattus norvegicus
gccaagatggcggcggcgcggccgcgggcgccagggcgacggcggcggctgaggctctgggctcgctgaagcgttggcacgtcgcgctctgggctcatgtaatcaaagaagtttctttgttgtgtgtatcttcacagaacacaacaggaattgaaaatgcatcagaacactgagtctgtggcagccactgagactctggctgaggtacctgaacatgtgcttcgaggacttccagaggaagtaagacttttcccatctgcagtcgacaagactcggattggtgtctgggctactaaaccaattttaaaagggaaaaagtttgggccatttgttggtgataagaagaagagatcccaggttaggaataatgtgtacatgtgggaggtctactacccaaatttggggtggatgtgcattgatgccaccgatccggagaagggcaactggctacgctatgtgaactgggcttgctcaggagaagagcagaatttatttccactggaaatcaacagagccatttactataaaaccttaaagccaatcgcgcctggcgaggagctcctggtctggtacaatggggaagacaaccctgagatagcagctgcgattgaggaagagcgagccagcgcccggagcaagcggagctccccgaagagccgcagagggaagaagaaatcacacgagaacaaaaacaaaggcatcagaacccaccccacacagctgaaggcaagtgagctggactctacctttgcaaacatgaggggctctgcagaaggtccaaaagaagaggatgagaggcctttggcttcggcacctgagcagccagcccctctgccggaggtggggaaccaagatgcagttccacaggtggccatccctctccctgcctgcgagccacagccagaggtagatgggaaacaagaagtcacagactgtgaggtcaatgatgtggaggaagaggagctggaagaggaagaggagctggaagaggaggaggaggaggagttgggagaagatggggtagaagaagcagacatgccgaatgaaagctctgcgaaagagccggagatccggtgtgaagaaaagccagaagacttattagaagagccacagagcatgtcgaatgaagctcgtgaagactctccagacgtgacccctcctccccacactcccagagctagagaggaggccaacggtgatgtacttgagacatttatgtttccgtgtcagcactgtgaaagaaaatttgcaacgaagcaggggctagagcgtcacatgcacatccacatttctaccatcaatcatgctttcaagtgcaagtactgtgggaaacggtttggcacacagattaacaggaggcggcatgaacggcgccacgaaacggggttgaagagaagacccagcatgactttacagtcctcagaggatccagatgatggcaagggggaaaatgttacttctaaagatgagtcaagtccacctcaactcgggcaagactgtttgatattgaactcagagaaaacctcacaggaagtactgaattcatcttttgtggaagaaaatggtgaagttaaagaacttcatccgtgcaaatactgcaaaaaggtatttggaactcacaccaatatgagacgacatcagcgtagagttcatgagcgccacctgattcccaaaggtgtcaggcgaaaaggaggacttctggaagagccacagccaccagcagagcaggctccaccctcccagaatgtctatgtcccaagcacagagccagaggaggaaggggaaacagatgacgtgtacatcatggacatttctagcaacatctctgaaaacctaaattactatattgacggtaagattcagaccaacagcagcactagtaactgtgatgtgattgagatggagtctaattctgcacacttgtatggcatagactgtctgctcactccagtgaccgtggagattactcagaacataaagagcactcaggtctctgtgacagatgatcttctcaaagactctcccagcagcacaaattgtgagtctaagaaacggaggactgccagtccacctgtgctccccaaaattaaaacggagacggagtctgattccacagcaccctcgtgttccttaagtctgcccctgagcatatccacagccgaggtggtgtccttccataaagagaagggcgtctatttgtcgtccaagctcaagcagcttcttcagacccaggacaagctgacccttcctgcagggttttcagcagctgagattcctaagttaggtcccgtgtgcgcgtctgctcctgcatccatgttgcccgtgacctctagtaggtttaagagacgcaccagctctccaccgagctctccacagcacagccctgcccttcgagacttcgggaaaccaaatgatgggaaagcagcatggacagacacagtcctgacttccaagaaacccaagttagaaagtcgtagtgactcaccagcatggagtttgtctgggagagatgaaagagaaaccggaagccctccttgctttgatgaatacaaaatatcaaaggaatgggcagccagttctactttcagcagtgtgtgcaaccaacagccattggatttatccagcggggtcaaacagaagtcagagggcacaggcaagactccagtcccatgggaatctgtattggatctcagtgtgcataaaaagccttgcgattctgaaggcaaggaattcaaagagaaccatttggcacagccagctgcaaagaagaaaaaaccaaccacctgtatgcttcaaaaggttcttctcaatgagtataatggtgttagcttacctacagaaaccacaccagaggtgaccaggagcccaagtccttgtaaatccccagatacacagccagatcctgaacttggtcctgactcaagttgctcagtccccactgctgagtctccacctgaagttgttggcccttcctcaccccctctccagacagcctccttatcctccggtcagctgcctcctctcttaacccccacagagccttcttcccctcccccctgccctcctgtgttaactgttgccactccaccacctcccctccttccaaccgtccctctctcccacccctcttctgatgcctcccctcagcagtgtccctctccgttctcaaacaccactgctcagtctcctcttcccattctctccccaacagtgtctccctctccctctcccattcctcctgtagagccacttatgtctgctgcttcccctggtcccccaacactttcttcctcctcctcttcttcctcttccttcccttcctcttcctgctcctccacctccccctccccaccccctctttcagcagtgtcatctgtggtttcctctggggacaacctggaggcatctctgcctgcagtaactttcaaacaggaggagtcagagagtgaaggtctgaaacccaaggaagaggccccacctgcagggggacagagtgtggtccaagaaacattcagcaaaaacttcatttgcaatgtctgtgaatcgccttttctttccattaaagacctaaccaaacatttatccgtccatgctgaagagtggcccttcaaatgtgagttttgtgtgcagctgtttaaggttaagactgatctatcagagcatcgatttctgcttcatggggttggaaatatctttgtgtgttctgtatgtaagaaagaatttgccttcttatgcaatctgcagcagcaccagcgtgatctccacccagatgaggtatgcacacaccacgagtttgaaagtgggaccctgaggccccagaacttcacagaccccagcaaggccaatgttgagcatatgccaagtttgccagaagagcctttagaaacttctagagaggaggagttaaatgattcctctgaagagctttacacgaccatcaaaataatggcttctggaataaagacgaaggatccagatgttcgacttggtctcaaccagcactacccgagctttaaacctcctccatttcagtaccaccatcgaaaccctatggggataggggtgacagccaccaacttcaccacccacaatattccacagactttcactactgccatccgctgcacaaagtgtgggaagggcgtcgacaatatgcctgagctgcataagcatatcttggcgtgtgcgtctgcaagtgacaagaagaggtacacccctaagaaaaacccagtgcccctgaaacaaactgtgcagcccaaaaatggagtggtggttctagacaactctgggaaaaatgccttcagacggatggggcagcccaagagactgagcttcaatgttgaactgggtaaaatgtctccaaacaagctcaagctgagtgcgctgaagaagaaaaaccagctggtgcagaaggccatccttcagaagaacagagccgcgaagcagaaggcggacctgagggatacttccgaggcgtcctcacacatctgcccgtactgtgacagggagttcacatacattggcagcctgaataagcatgccgccttcagctgtcctaaaaaacctctttctccttccaaaagaaaagtttcccattcgtctaagaaaggtggccatgcatcatcttctagcagtgacagaaacagcagctgccacccccggaggcggactgcagataccgagatcaagatgcagagcacgcaggcacccttgggcaagaccagagctcggagtacaggccccgcccaggcctcactgccctcctcgtccttcagatccagacagaatgtcaaatttgcagcttcagtgaaatccaaaaaagcaagctcttcatccttgaggaattccagtcccataagaatggccaaaattactcacgtcgagggcaaaaaacccaaagctgttgccaagagtcattctgctcagctctcaagcaaatcctcccgaggcctgcatgtcagagtgcagaagagcaaagctgtcatacagagcaagactgccctggccagtaagaggagaacagaccggttcatagtgaaatctagagagcgcagcgggggcccaatcacccgaagccttcagctggcagctgctgcggacctgagtgaaagcaggagagaggacagcagtgccaggcatgagctgaaggacttcagctacagtctccgcctggcatctcgatgcggctcatcaacagcctcttacatcaccagacaatgcagaaaggtcaaggccgccgcagcaactccgttccagggacccttcctcaaagagtaggcactctgtctgctccttaacagcacctgaagtgacctggaatcagtgaagccaaagggaccagcagtctgccctgcagagagcactgacctctcccagttgtgagagtgagagaacgagagagagagagagagagagagagagagagagagagagagagaatgagaatgtgtgtgtgtgtgtgctggtgcatgtgtgtggtcttcaagccaaggtcccagcctcaggagcaggaccttcccatttcccgtcatcctctggatgatccttggacgtggcccagaaccgtgctctgtggtgcagccatcctgcccgggaggggcatctccttctatgcaatttttttaaagagttccttggccctgctttgtgcttcttgagctgtccgtttgccaccactgggacttggatctggccctgaggggtggggaagagggcctatctaaggataacctttcagaggtcaagctccccttcatgccacccctcccccctgccctcaccgaccttttccccacactgtctctgggaatcaatagcagatagcatatagatccatcagggttgagcctgaacctcggccctagcactaggaaatcccccttttctccctaagcaactggagccgccagctttcaagtcatttcctcctttgaggttctagagtccgagagtctgctccgaagtctctcctgggaacccgggagccctcgcacccaggacgcagactctgtgcccattcttagacctgaggtagaagaagcagtgttttgggacgatagggtggaggcgtgcctactttgtctcctctggtgggacctcctacatcattggcatctgaaccttgcaagttcgctgcaaagagaagcaaagga

SEQ ID NO: 1427 - DNA, 5543 bp, Rattus norvegicus
cgggcgagcgctagcggccgcggcggccgcgcggaacccagggaggcgggacgcagagccggagcgcggccccgaccaggcgggagcccgagcagcgctggcgtggatgctccccatcgcttggtcgttggagactcggttgctttttaatggcagcagcggctgttggatgactagagtttgttttgactggagggtcgcttttgcttggcactataactgctggattggtccttcctggcccttccactgttgaagggagaagatgccactgccatttgggttgaaattgaaacgcacccggcgctacactgtgtccagcaagagctgcctggttgcacggatccagctgctcaataatgagtttgtggagttcactctgtccgtggagagcactggccaggagagcctagaagctgtggcccaacgcctggagctgagagagatcacgtacttcagcctctggtactacaacaagcagaatcagcgtcgctgggtggatttggagaaacccctgaagaagcagctggacaagcacgcgctggagcccaccgtctactttggagtggtgttttatgtgccctctgtttcccagctgcagcaggagatcaccaggtaccagtattacctgcagctgaagaaggatgttctggaaggaaaccttccctgcacattggagcaagccattcagctggctggcttagctgttcaagctgattttggcgactttgatcagtatgaatcccaagattttcttcagaaattcgccttgctccctgtggggtggctacaggatgaaaaactgctggaagaagcagcccaaaaagtggccttgctgcatcagaaatacagagggctcacagctcctgaggccgagatgctgtacatgcaggaggtagagcggatggacggctatggagaggagagctaccctgccaaggacagccaaggaagtgacatatccattggtgcttgtctcgatggcatctttgtgaagcacaagaatgggaggcctcccgtggtgttcaggtggcacgacattgctaacatgtcacacaataagtccttttttgcgttagaactggcaaataaagaggagaccatccagtttcaaactgaagacatggaaacagcaaagtacgtgtggaggctgtgtgtggcacgccacaaattttacagactgaaccagtgtaacctgcaaactcaggctgccacgttgaactccgtcaggaggggctcatcgtccaggatgtctctgcctaaaccccagccctatgcgatgcctcccccaccccagctgcattataatggacattatacagagccatttgcttcttcccaagacaatgtctttgtgcccaacaagaatggattctattgccactcccagacaagtttggacagaacccaaattgacctcagtggccgcatccgcaacggcagcgtgtacagtgcacacagtacgaactccttaaacacacctcagccctacctgcagccctcccctatgtcctccaaccccagtattccaggcagcgatgtcatgagacctgactacatcccatcccaccggcacagcgccttgattcccccatcctaccgcccgacccctgactacgagagcgtgatgaagcggctcaacagaggcatggtgcatgcagacaggcatagccactcgctcaggaacctcaacattggcagttcctatgcatacagcaggcccgacgccttggtctacagccagcctgagattcgggaacacccacacctcgcctctccccagtcagcccactacccatttaacttgaactacagtttccacagccaggctccgtatccataccctgtggagaggcggcctgtggtgggcgctgtgagtgtccctgagctgaccaatgtgcagctgcaggcccaggactacccagctccaaacattatgaggacccaggtgtaccggccgcccccgccatatccttacccaagacctgccaacagcaccccggacctatcgcggcacctctacatcagcagcagcaatccagatctcatcaccagacgcgtccatcactcggtgcagaccttccaggaggacagcttgcccgtggctcactctctgcaggaggtgagtgagcccctcacagcagctcggcatgcacacctacagaagaggaacagtattgaaatcgcagggctcacacatggtttcgaaggcctgaggctcaaggaggagacgatgtcagcctcagccgcagacgtggctcccaggaccttctcagcaggctcccagtccagcgtcttctctgacaaagtgaagcaggagggaaccgaagagcaggggagtggtgggtacagtcacaagaagtccctttctgatgccaccatgctgattcacagcagcgaggaggatgaggacttagaagacgacagcagcagagaacacgctgtgtctgagccccgccttacggctgctttctctcaggaacaacagctaaactacccctgtgcttcagtgactccggtcactggccctctgcatattttcgagcccaagtcccatgttacggagcctgagaagagggcaaaggacatcagccctgtccacctggttatggagactcatcagccccgaagacatggactgctgaccccctccatgtccgagtcagacctcacgacgtcagggaggtaccgagctaggagggactctctcaagaagaggccagtgtcagatctcctctctgggaagaagaacactgtggaaggacttccgccactagggggaatgaaaaagactcgagcagatgcaaaaaaaattggccccctcaagctggcagccctcaatggactctccctgtcccggctgcccctgcctgacgaaggcaaagaagtgtccaccagagcgacaaatgacgagaggtgtaaagttctggagcagcggttagagcaaggaacggtcttcaccgagtatgagaggattctgaaaaagcggctggttgatggcgagtgctcaacagctcggctccctgaaaatgcagagagaaaccgattccaagatgtgctcccctacgatgatgccagagtggagttggtgccaaccaaggagaacaacactggctatatcaatgcgtcacacattaaggtctctgtcagcggaattgaatgggattatattgccacacagggaccattacaaaatacctgccaggacttttggcagatggtgtgggaacagggagtcgcaattatagcaatggtgacagcggaagaggagggaggtcgggagaagagctttaggtattggccacggcttggctccaggcacaacactgtcacctatggaaggtttaagatcacaactcgcttccgcacggactcgggctgctacgccaccacaggtttgaagatgaagcaccttctcacagggcaggagaggacagtttggcatctccagtacacagactggcctgaacatggctgtcccgaagacctcaagggatttttatcataccttgaagagatccagtcagttcgacgtcatacaaacagtacaagtgaacccagaagtcccaaccccccgctgctggtgcactgcagtgctggcgtgggaagaactggggttgtcattctgtcagagatcatggtggcctgtctggaacacaatgaggtgctggacatccccagagtgctggagctgctgaggcagcagaggatgatgctggtgcagacacttagccagtacacgttcgtgtaccgggtgctcattcagttcctgaagagctctaggctcatctaagctccaccacctttctatggggacccaatcatgtgatgtgtttacagctttaaaaagaaaaaggaaagaaaagagtgcagctcccactttgttcccaggagtccatgtggagacctcaacaggaagtgtgtaagagctgaagaagctaagcatggggctgaggagtctggggacctgggagaggccgaggaggcaggtgctgccctggccacatctgcctggtttgctgcacttgcacaagttttggagattgtattttctagacagttctctgtcgtactgaagctgcctgggcagtcccagccagcacttaaggcacacagacttctatcttaaactcatatttgataatgcaattttatgactaaatagggttttttcttttttagctagaagctgaacttttctgtgggacatccacagaccgtgtggttcttgagtacctgtatttaaaaccattattagcttttgtttaagaacaaaaaccatgggggaactaagtgttttattcatgaaatccaaaactaaagaaaatctaaaagtgttattttgaaacatagaaagcatttttatattcagaatgtttttttaaaagttatatatttgtaccttctatattttccaaataagagctccattgttatgacactgagtcaatgtaaagttggggataaaggcacattatttaaaaatctaagaatcagattcactattttttcagtattattagtaagcgtaaaatgagtttgatttttttgaacatgaaagagcaattgcataggatggttttaagcacttttttgttaaaaatgagtttaatatatgtggctttatatttaagcaacagtggacactatttcaaagagaagggctctgagtacgttcgatgactaggggaagaggaagtgctctcggggctcacccggaaggtgtggtcattacacaaatgcagtattacctatgctcactcgagcgagagcgagagctgagatggcgtggaactcaaggcctgctaccgtgatgacgggctttgctgcctggggttcttcctgtctttcttccccccacagacaagtccaggcttacattaccattagagacccccgaagaggctttgtttcctttaggttgaaaggaggaaatagttaacgaggttcctttccctgaaccacagcccaaacttgtggggccaccagaaattgctgtggtgttcagggggtacttgaatttagcaccgtaatcctgtcctcccccagggtcagttctaggtactggtctccctttccatcccatttgggcacattctctattgatcagaacccaggcttgaagtggaaagtgctgttcttggaggacaagctggcacccttagctgaggtgtgtcatgttgtccagtgccctgcatcgtaggctgccgattcagtgtggacctagaatgttcgacctaggactagcttccaatactgtcctgccatcactctgatttgactttgtggtgagcgtcaccacatgacaggggtgtgccagcccatcgaagcaggacagacacaggtggattgtgccccagggtgggatttgtgtgctctatgctccatgtcaagccatgtgaaggtcaggacccttctgaagcttttcttccaatggtacgttgtttgaagatgctttcctgtcacacctaaacatttggaaatatcccactgacaagaacacattgtaaaacaaaactttaattaaagagtaatatatggca

SEQ ID NO: 1428 - DNA, 3508 bp, Rattus norvegicus
ggcacgaggctcgctgcgggctccaggcttggccgcacttgctcaccagtggtgcgcccggggcttttgtggcttagccggcctgggctttgtgtccgagttctgctccgtgcctgcggcgcttctcccggtcagggattcccgaggcggcgtgcgcagcccccgggaccagcgagcgatcgagcgagcgcgccggcttgagcggtggcgactgcgaggggccgaggaggagagaaggagggggacgagatgccggagttcctagaggacccttcggtcctgaccaaagacaagttgaagagcgagttggtcgccaacaacgtgacgctcccggccggcgagcagcgcaaggacgtgtacgtgcagctctacctgcagcacctcacggcgcgcaaccggccgccgctcgccgcgggagccaacagcaaagggccgcccgacttctcgagcgacgaggagcgcgagcccaccccagtgcttggctccggggcctccgtgggtcgcggccgcggcgccgtcggcaggaaagccacaaagaaaactgataagcccaggccagaagataaagatgatctggatgtgacagagctctctaacgaagaacttctggaacagcttgtgagatatggagtgaatcctggtcccattgtgggaaccaccaggaagctgtatgagaagaagctgttgaagctgagggaacagggagcagaatcgagatcctctactcctctcccaacagtctcttcctctgcagaaaacacgaggcagaatggaagtaatgactctgacagatacagtgacaatgacgaagactctaaaatagagctcaagcttgagaagagagagccgctaaagggcagagcaaagactccagtaacactcaagcaaaggaggattgagcacaatcagagctattctgaagctggagtaactgagactgaatggacaagtggatcttcaaaaggcggacctctgcaggcattaactagggagtccacgagagggtcgagaagaactccaaggagaagggtggaaccctcacagcattttcgtgtagatggtgcagtaatttcagagagtactcccatagctgagactataaaggcttccagcaacgactccttagtggccaataggttgactggaaatttcaagcatgcatcttctattctgccaatcactgaattctcagacataaccagaagaacaccaaagaaaccattgacaagagctgaagtgggagaaaaaacagaggaaagaagagtagaaagggatattctgaaggaaatgttcccgtatgaagcctctactccaaccggaattagtgctagttgccgcagaccaatcaaaggtgctgccggccggccgctcgagctcagtgacttcaggatggaagaatcgttctcatctaagtacgtcccgaagtacgttcccttggcagacgtcaagtcggaaaagacaaagaagggacgctccgttcccatgtggataaaaatgctgctgtttgctctcgtggcgggttttttgtttttggtctatcaagctatggaaaccaaccaaggaaaccccttcactaattttcttcaagatactaaaatatccaactgaagaaatcatttcggcacatccgactcgatctcctgtttttaataactgtagaaaagcatctgtgtccacttgttggccgaagaactaaattgtgatttcacctcagtaaaggtagcgctgcgttggaaagcagacaggaagcttacctggatctcatttcaatgttttggactttggagatcacactgtgccatatgaataatttttttagctccagaacttttttgtaggctttatttttttaatgtggacatcttatttcacttttggggaaaatgcattgttttgtgtatttgaaaaataaggcaaaacatggtgatgtaatgtgaagctacacattaaatacttggaattcttacagaaaagatttatgacttattctctgctgagtaaaaatgttagaaatgtgaatggcgttcagtaagagaagcggtcacgagttgtgcttccttccatatgcagcggtttgtccgtggaaggtccagcaataagctcttctgggactcctgtcgtgcgtgtggtgtcgctggcgcacctgccacactgctcactagaatattttcatatcatgaaagtgctacgtcattaaagccctgagtacacttagttttccactgggatcttggagagcaacatagatacctgcttagggagcctttagctggctgcgcgcgtctaagagaccgagggctagctagaagctcccgttgggatcctgtgcttgtatttacggcaaagcatctatcccgtccatccagctcatcagactgttctgtaggtaaataagcatgggggtgtttgtttagagttagaaactaaacaccagtcccctccacttcagtccgattccattgtcgtcttttaaccaaaaaaaagttttcctggccagggatttttgttttgctttgttttagatggagttggggtgttgagatttttgtttgttttaggcatgtaattcctgatgtaatttgatttaaaagtataactgacttgcttttaaatcacatatatagtagctaatgcttaatttgtaatttcaaataaggtgggcattatggttctgtgtattcctgaagtgattaacgatatccttatggttgtcttttttagctgaaatttacctcatgtatggcttagatgatgttgcagtcgatttaaattttggtaaaaatcaagtacagcataaacatttttaactaaatcatttaagttgcaattttacagtcattgaccacaaagcacactaaaaatgtaaattatttttaataacatccggaatgtaaagacagttttaatttttacaaaggaggaagctgaatatgaatatctagaccagcacacaactttgacttaatgtttactgtgtttagcttatagatatgtcgtaggcatttgaagtaaacttctgccccagagaccagaacatggaccagaacatgtaggcctggtccgtgaggcgtgtggggagctgacttagatctgaagtgctttcctctcaaagacaagccacaaggggcatgttttactcaactttccctctctacagtgacagccatctttctttgttctcagacacagcttctcatattgctttcagtcatctgtttataattaaaaattgtgagaagccccatttgatgtttaaaaacaggggtgggggttaatctggcttcacatttctataaggtcgctctggatagggaagtgtggtccagtacagtgaaagtcggaccaggtaaaacatgccattttctttttaaaagcgtgtacttggtcttttgtctgtgtctgttttattccactagagtaaatgtgtccttgatgtaaatgcaaagcatttattaattcgtagatgtagactttacaatataattcaataataaagtaattaacctct

SEQ ID NO: 1429 - DNA, 2070 bp, Rattus norvegicus
ctgagttctgagcgtctacagcgaaagtgctgggctttggaaaggagacctgggctccgaatcctctcagggccttggacgtctctgacccaaaacaatccaaggttcttatttgaagaccaccatcccagaagcacattctcgagttgaaaagttggagtggtgttcgaaatgaatctgattgggccctcccatttacaagccacggacgagtttgctctttctgaaaacttatttggagtgctaacagagcacgcggcaggtcctctggggcagaatctggacttggaatcgtactccccatacaacaatgtgcagtttcctcaagttcagccacagatctcctcctcgtcctattattccaacctgggtttctacccgcaacaaccggaagactggtactctcctggactctatgaactcaggcgaatgcccactgagagtgtgtaccagggagagactgaggtatccgagatgcctgtgacaaagaagccgcgaatggccgcctcatcggcgggaagaataaaaggggatgagctgtgtgtggtctgcggagacagggcctctgggtaccattacaacgcgctcacctgcgagggctgcaaaggtttcttccgaagaagcatcaccaaaaacgccgtgtacaagtgtaagaacgggggcaactgcgtgatggatatgtacatgcgtcggaagtgccaggattgccggctaaggaagtgcagagagatgggaatgttggctgaatgtttgttaactgaaattcagtgtaaatctaaacggctaaggaaaaatgtgaagcagcatgcggatcagacagtgaatgaggacagcgaagggcgtgacttgcggcaagtgacctccacgaccaagctatgcagggagaaaactgaactcactgtagaccagcagaccctcctggattatattatggactcatacagcaaacagagaatgccacaggagatcacaaataaaatcttaaaagaagaatttagtgcagaagaaaattttctcatattaacagaaatggctaccagtcacgtacagattctcgtagaattcacaaaaagacttccagggtttcagacactggaccacgaagaccagattgctttgctcaaagggtccgcagtcgaggccatgttccttcgttcagcggagattttcaataagaaacttcctgccggacacgcagacctgttggaagaaagaattcgaaagagcggcatctccgatgagtacataaccccgatgtttagtttctataaaagtgtcggggagctgaaaatgacccaggaagagtacgctctgctcacagcaattgtcatcctctctccagacagacaatacataaaggatagagaggcagtggagaagcttcaggagcctctgctcgatgtcctacaaaaactctgcaagatctaccagcccgagaaccctcagcatttcgcctgcctcctgggtcgcctgacagaactccggacattcaaccatcaccacgctgagatgctgatgtcttggagggtgaatgaccacaagttcaccccgctcctctgtgagatctgggatgtgcagtgaaggacacggggagaggctagctccttgtcctcctcagagcagcaacctggtattggacttcccttcttttcatttgtaccaggtctcactcaagaatctcaatgaatatttatgtggcaattatacaattcccacaactgtaaatacaggctccatagaattgcttcccctacactgtattttacaaggcttcgggaaaccccactgacacgccctttttgcctcattaaatcaattgttacttcaattttgtcaactgagctagggaccgcctcgttttatcctccatgcggcaacattatatatatatatattttatcaaatagctgttttctcttccttttttttttttttttttttcggagctggggactgaacccagggccttgcgcttgctaggcaagcgctctaccactgagctaaatccccaacccctattaaatagctgttttcaactgagacaataaactgaacgtaatgccaagagaa

SEQ ID NO: 1430 - DNA, 660 bp, Rattus norvegicus
ttcccggtgtatgactatgacccttcctctctgcaagaagctctcagtgcctcagtggctaaggtgaactcgcaatccctgagtccttacctgtttcgggcgacgcggagctccctgaagagagttaatgtcctggatgaagacacactggtcatgaacttagagttcaccgttcaggaaactacatgcctaagagagtctggtgatccctccacctgcgccttccaaaggggctactctgtgccaacagctgcttgcaggagcacagtgcagatgtccaagggacaggtgaaggatgtgtgggctcactgccgctggcgttccacatccgagtccaacagcagtgaggagatgatttttggggacatggcaagatcccaccgacgaagaaatgattatctacttggctttctttatgatgaacccaaaggagagcagttctatgaccggtcgattgagatcacgaggaggggacatcctcctgcccatagaaggttcctgaacctccaacgcagagccagagtcaattctggctttgagtgacatcctggagattccatgaaagaaagagaagcagaagctgaaatgaaggacatggagaattgtgtctttttcctttgataagctccactttgcaataaagatcttccccttcctgta

SEQ ID NO: 1431 - DNA, 2310 bp, Rattus norvegicus
tagaatcgaaccgcggaaagtccatcgtccctatcgaccaacagctacgtaaacaactatggcgggagagaggtggcgggccgaggggctgggagaaggatgggccatctacgtcacacccagagcccccatccgggagggaaggcggaggctcgccactcaaaatggcgacgggagtgacgcgcctgcgtacgaaactcatccgtcgcgccacggacgacgggaagtgaggttttcagaagagccgccagaagtgtacggcgacttcgagccccgggcggccaaagaaaggtctccgggggaaagacgaaccccgccagaaaagttccggtcggattctgcgaaagaggaagtgagagaaagcgcttacaatcttcggtctcgacaacggaggcagcggggaccccaggaagccgaggagatgaagacgcggaggtctactcgtctggagcagcactcacagcaggcgcagcagcagctgtcaccggctacgagcgggcgaggattacgggacgctcagtccttaagtgaggaccgcggagaggatgaaccttcttcccaacctgttacaagccaaacagtctcaaagaaaactgtcaggacaccagagacttcagtgatgagtgaagatcctatcagtaacttatgcagacccccattaagaagcccaagacctgacgcttccattgtccaacacatcaacccctttgaggaagatgaagccgcagtagcagccggtcaccatccagactcactgtgggggttaccacacagtcggggggacttcacagctcatgagaatcaaccctcactgctgcccacaggatgtcaaaaaaaccctcaagagtgggttgaacaagctgtgagaatgaggactagaatggcatataacaacattcagaaatcagactttggaaaccaatctccatcaacctccaggcaacaagcagctgtacaacccccagatgagtcttctgtcaagataaaatggtggctgctgatacttgttgctgctctggccatgggaatatattggttctttcatactcctgtagtagaaatcactgcagctcaggatgctgcggaagtgctcaagtgtctgagtgaacagatcgccgatgcctactcttccttccgcagtgtccgtgccatccggatcgacggagcaggcaaagctgctcaagacagtgacctcgttaagcacgaagtcgatcaggaactgacagatggatttagaaatggccagaatgcagctgtggtccaccgcttcgaatccctgcctgcaggctcaaccttgatcttctataaatactgtgaccatgaaaacgcagccttcaaagatgtggccctcgtcttgacggtactgttggaggagcagacgctggaagccagtctaggcctaaaggaaattgaggagaaagtgagggatttccttaaagtcaagttcaccagctctgacacggccaactcctacaaccacatggacccagacaagctcaatggactctggagccgcatctcccacctcgtgctgcccgtgcagcctgagaatgctctgaaagcaggcagctgcttatgagggaaagaagcggaaatcctgtctcgagtttgaaccattttcagactttgtaaccagagacggattttggagcagtttttgaaaactggtttctttttaaaggaagtaaagttcatacataaaggtggaataactaaatcatttatgcagcctacttctctgtgatttgggagaatcgtttttctatttccacctagaaccatgttaaagatatttagcatagtgcacagtatatgcagtccccgagtgtctgctaccttgattctggccgaatcattcttgctgtgtgaccagcgagaagggctaggttcctctctcaagcaatcagctttctattgaattttggatttgtgtttgtgaccttattaatgtctgacaaccccctaattgtagctatggatttccctgttacttcttctctcataccattgaaatgtgtggtccttagtttctacctataaaaataaaactgggtgtgcagtttagccagcccctcccccactggtttgtagagagggagacaagggtgtgggaggtagaaagagaagagaaattgtttaatagggaagggaaggaaggaaggtaaaaagatgttgcaagctgggcatggtaagccagcctgttatcccagtattgtcccagtagtcaggaggagcagaggttcaaggtcagcctcatctatagagtgagttttctgccacctggactacatgagacactgtcttaaaaac

SEQ ID NO: 1432 - DNA, 975 bp, Rattus norvegicus
ctgatcaacaacttcagggtgatgggaaaataattgataggagaccagaaaggcgaccacctcgtgaaagaagatttgaaaagccacttgaagaaaaaggtgaaggaggtgaattttcagttgatagaccgatcatcgaacggcctatccgaggccgaggtggtcttggaaggggtcgaggtggccgtggccgtggaatgggccgaggtgatggatttgattctcgtggcaagcgtgaatttgataggcatagtggaagtgatagatctggcctgaagcatgaggacaaacgtggaggtagcggatctcacaactggggaactgtcaaagatgaattaacagagtcacccaaatacattcagaaacaaatatcttataattgcagtgatttggagcaatcaaatgtgactagggaaacacctgaaggtgaagagcacccagtggcagacactgaaaataaggagaacgaagttgaagaggttaaggaagagggtccaaaagagatgactttggatgagtggaaagctattcaaaataaagaccgagcaaaagtagatttaatatccgaaaaccaaatgaaggtgctgatggacaatggaaaaagggatttgttctgcataaatcaaaagttgaagaggctcatgcggaagattcagttatggaccatcatttccggaagccagaaaatgatataacgtctcaactggagatcaatttggggagacctaggccgcccaggacgttgtgggagagagaggacgtcgtggacgtggccgtggtggtcgtcctaatcgtggcagcaggactgataagtcaagtgctttctgctcctgatgtagatggccccagaggcattcccccgctctggcctaactggatgccataatacaacactggttcctttgtggaccctcctgttcaaagcttttgcatgcttacttttgcatgcttaaggatcccaaacaactaagaatt

SEQ ID NO: 1433 - DNA, 428 bp, Rattus norvegicus
caccctaacctaaaccttttgaattttgaattaatgggtaccctatagaaaaaatgacctgcggaaaaccaaacagtgaagggaaagaaggaaagaattccaattgacacaatttaaataaaatatggcttttcaaataaaggaagagaagtttcttttgggcacacaatctaaacaatatttatgtataattcagctcttatttggcttaaatgggcttagtgggaaatgttatcatttttactattttctacagagaaaatattttccagtttatcaagtaactctggactttggaattacctgtttttatgttccagctgtctatatagttgtttctctgaaattgtacataaaatgtttttacattaaaatgaattactgtataaagtactgcattatgcataataaagatactaatgctttat

SEQ ID NO: 1434 - DNA, 1864 bp, Rattus norvegicus
ggaaagcgagtatccctcccaccccaggctggtgttcctctgcactccgtgtcctggcccagagtccctctcggcgctccccaacccggcccccgcccctccctagaccggccgggccccgaagtcatggagcgctggccttggccgtcgggcggcgcctggctgctggtggctgcccgcgcgctgctgcagctgctgcgctcagacctgcgtctgggccgcccgttgttggcggcgctggccctgctggccgctctcgactggctgtgccagcgcctgctgcccccgccggctgcactcgtggtgctggctggtgctggctggatcgcgttgtcccgcctagcgcgccctcctcgcctgccggtggccactcgcgcggtgctcatcaccggttgtgacactggttttggcaaggagacagctaagaaactggatgccatgggcttcacggtgctggccactgtgttggatttgaatggccctggtgctctagaactgcgtgcccgatgttcccctcgcctgaagctgctgcagatggacctgaccaagccagaggatatcagccgtgttctggaaattaccaaggctcacacggccagcactggcctgtggggtctggttaacaatgctggcctcaacatggtagtggccgatgtggaactgtctccagtggtaactttccgcgaatgtatggaggtgaacttctttggtgcacttgagctgaccaagggcctcctgccactcctacgtcactcaaggggacgtattgtgaccgttggcagcccagcaggagacatgccatacccctgcttggcagcctatggaacctccaaggcagctattgcactgctcatggacacattcagctgtgaactgcttccctggggtatcaaggtcagcatcatccagcctggctgcttcaagacagaggcagtgactaatgtgaacctctgggagaagcgcaagcaactgctgctggccaacttgcctagagagctgctgcaggcctatggtgaagactacattgagcacttgcatgggcaattcctgaattcactcagaatggcattgcctgaccttagccccgttgtagatgccatcattgatgcactgctggcagctcagccacgcagccgctactacacgggccgtggcctggggctcatgtatttcatccaccactacctgccaggaggcctgcggcgccgcttcctacagaacttcttcatcagtcaccttctaccccgagcactgaggcctggccaacctggccctgttcatgacacaacccaggacccaaacccttcccccacagtatcagctctgtgaaccacaaacttaggtgtttcagcaggagaggcttcttgagcccttggccctctcccctggccattatagacccctcaacctttccctagagtctctgttaagaaaagcccagcctctactgctgatgccgagtccaggcccgggaggtggaatttgctagtgatcctctggacctctcctctgcttcatgagaccatgtataccctaccaggcacgacccttcagcttggagagcccagatggatggagagtttagcgtgagatgtggctgcaacctttgagaggatgctacagaccacttctgtgctgactttagaatgattagacatgtggggcctcctcagaattctttgggtacccactgtctcagtgctgcagtccagagtaaatccctcttgactggctcaagatttaggttcccaaccactggctcccagccacatggaagctgtatgctgtatttgtctggttgttggcattttaaaataaagatacatttttttatttctcctagaatgggagagatagtgtttgg

SEQ ID NO: 1435 - DNA, 1392 bp, Rattus norvegicus
ccgggatccctgcgcgccgtggtgttctgtgccttgccggtctgttccctccgattgtgcctagcaatgaccacccagcagattgttctccagggcccgggaccctggggtttccgactcgtgggcggcaaggactttgagcaacctctcgccatttcccgggtcactcccgggagcaaggctgctatagctaacttatgcataggagatttgatcacagccattgatggggaagataccagcagtatgacacacttggaagctcagaacaaaatcaagggctgcgtagacaacatgacgctcacagtatccaggtctgagcagaagatttggtctcctctagtgaccgaggaggggaaacgtcacccctacaagatgaatttagcgtcggaaccccaagaagtcctgcacatcggaagtgcccacaaccgtagtgctatgccatttaccgcctcacctgctcctggcacccgggtcatcacaaaccagtacaacagccctaccggcctctactcatctgaaaacatctctaacttcaacaatgcagtggagtcaaagacctcagccagtggggaggaggcgaacagcaggccctcggctcagcctcatccctccggcggccttatcatcgacaaggaatccgaagtttacaagatgcttcaggagaagcaagagttaaacgagccccccaaacagtccacatcattcctggttctgcaggagatcctggagtcggatgggaaaggggaccccaacaagccatcaggatttagaagtgttaaagctccagtcaccaaagtggctgcatctgttggaaatgctcagaagctgcccatctgtgacaaatgtggaaccggcattgttggtgtgtttgtgaagctgagggaccatcatccccaccctgaatgttatgtgtgcaccgactgtggcatcaacctgaaacagaagggccatttctttgtaggggatcagatttattgtgaaaagcatgcccgggagagggtcacaccacctgagggctatgatgtggtcacagtgttccccaagtgatcgagaggacctgccctgtctgctgccctccagcctgcctgctgcacctggttgtcagaatgttctggttctctcctccctgacagtcctgtgcttagtgttagtcctgctcagtaaacattgagtttctcctgtactgactgaccctgactggcagtgtgacacctgcttttacattaccgggaggtggttttgtccctgtcccctcacccacaccacaatgcaccttcttcccttggagtcttccctgctgaaaatggacattggtcacattggaattaagccaaatgttttatctctgatgttactttgttttacttaataaatttagactttaaagcc

SEQ ID NO: 1436 - DNA, 759 bp, Rattus norvegicus
ggcacgagcagtgcccgagttaaggggaattggaggcaggcgccgatccacagcgatatcgagacactcagagccacaggcaccatgtccgatcctggtgatgtccgacctgttccacacaggagcaaagtatgccgtcgtctgttcggtcccgtggacagtgagcagttgagccgcgattgcgatgcgctcatggcgagctgtctccaggaggcccgagaacggtggaactttgacttcgccactgagacgccactggagggcaactacgtctgggagcgtgttcggagcccagggctgcccaagatctacctgagccctgggtcccgccgccgtgatgacctgggaggggacaagaggcccagtacctcctcggccctgctgcaggggccagggccagctccggaggaccacgtggccttgtcgctgtcttgcactctggtgtctcacgcccctgagaggcctgaagactccccgggcgggaccgggacatctcagggccgaaaacggaggcagaccagcctaacagatttctatcactccaagcgccgattggtcttctgcaagagaaagccctgaagtgcccacgggaggctcgccttcttctgctgtgggtcaggaggcctcttccccatcttctgccttagccttcattcagtgtgtcttaattattatttgtgttttaatttaaacttctcctgtatatactctgcctgccccctcccctcgtgcaattcgatatacaagcttatcgatacc

SEQ ID NO: 1437 - DNA, 2757 bp, Rattus norvegicus
gccagcgaggagagctaaaactacaagagtggatcatgacccatgaagagcatcatgaagccaaaaccctggggatcggcaaggccatcgccgtgttgacctctggtggagatgcccaaggtatgaatgctacggtcagggctgtggtacgagttggcatcttcaccgggctccgcgtcttctttgtccatgagggttaccaaggcctggtggatggtggagagcacatcagggaggccacctgggagagcgtgtccatgatgctccagctgggaggcacggtgattggaagtgcccgatgcaaggacttccgggagcgagaaggacgactccgagctgcccacaacctggtgaagcgggggatcaccaatctgtgtgtcatcggaggcgatggcagcctcactggggctgacacttttcgttcagagtggagtgacttattgaatgacctccagaaagatgggaagatcacagccgaggagcgtacaaagtccagctacctgaacatcgttttcctggttggctcaatcgacaatgacttctgtggcactgatatgaccattggtactgactctgccctgcaccgcattgtagagatcgtggacgccatcaccaccaccgctcagagccaccagaggacatttgtgttagaagtgatgggccgccactgtggatacctggcccttgtcacctctctgtcgtgtggggccgactgggttttcattcccgagtgtccgccagatgacgactgggaagaacacctttgtcgccgtctcagtgagacaagaacccgtggttctcgtctcaacatcatcattgttgctgagggtgcaatcgacaaaaacgggaagccaatcacctcagaagacatcaagaacctggtggtaaagcgtcttggatatgataccagggtcactgttctgggacatgtacagaggggtgggacaccatcagcctttgaccggatcctgggcagcaggatgggtgtggaagcagtgatggcacttttggaggggaccccagacaccccagcctgtgtggtgagcctctctggtaatacggctgtgcgcctgcccctcatggagtgtgtccaggtgaccaaagacgtgaccaaggctatggatgagaagagatttgatgaagccattaagctgagaggccggagcttcatgaacaactgggaggtatacaagcttctagctcatgtcagacccccagtctctaagggcgggttgcacacggtggctgtgatgaacgtgggggccccagctgctggaatgaatgctgcagttcgctctactgtgaggattggccttatccaaggcaaccgagtgctggtcgtgcatgatggctttgagggtctggccaaaggtcagattgaggaagctggctggagctatgttggaggctggactggtcaaggtggttccaaacttggtactaaaaggactctacccaagaagaacctggaacagatcagtgccaacataaccaagtataacatccagggcctggttatcattgggggctttgaggcttacacagggggcttggagctgatggagggcaggaagcagtttgatgagctctgcatcccatttgtggtcattcccgccacggtttccaataatgtcccagggtcagacttcagcatcggggctgacacagcactgaacaccatctgcacgacctgtgaccgaatcaagcagtctgcagcaggcaccaagcggcgagtgtttatcatcgagacgatgggtggttactgtggctatctggccaccatggcaggactggcggctggggctgatgctgcctacatttttgaggagcccttcaccatccgagatctccaggttaatgttgaacatctggtgcagaagatgaaaacaactgtgaagagaggcctggtgctgaggaatgagaagtgcaacgagaactacactactgatttcattttcaacctgtactctgaggaggggaagggcatcttcgacagcaggaagaacgtgcttggccacatgcagcagggtggaaacccaactccctttgacaggaattttgccaccaagatgggtgctaaggctacgaattggatgtctgggaaaatcaaagagagttaccgtaatggacggatctttgccaacactcccgactcaggttgtgttctggggatgcgtaagagggccctggtctttcagccagtgactgagctgaaggaccagacagattttgagcaccgaatccccaaagaacagtggtggctgaagctgaggccaatcctcaaaatcctggccaagtacgagattgatctggacacctctgaccacgcccacctggagcacatttccaggaagcggtctggagaagctgctgtctagaccactttggagtgaggggaaaatcacctgatcatggtcagctcacaccctggtagacctcagcccatggcttctcagtgttgtagcccagcccctacccttctaggtttccctgtactctgtacctgcaaccaggatcactgtggccaggtgttgggggaggggtggtgagtgcctctcctaggtagctgtccttccttgcaccctggcttcatctgtcacacaggctggatgtctctagtgctactgctagatttcagcttctcaagagtaaaagtgagctttatttatttctttgtgataacaaagagtcctaggtcctttccttgtaccacagtgaagtgtaactacactaataaaagccagctggccactgtga

SEQ ID NO: 1438 - DNA, 704 bp, Rattus norvegicus
caaacgcctccttgttcctctttttgcctccatccagtcaactgtggaaagccaccctcaaggacagagtacaagaatgtataaaagcctgggagaactcttcctggactaattccttcctcctgctcactggttgccttaaccctactgaagcatgatgatctgcaaggtcctggtgatcactgtcttctgtgtgctgactgtggctttccccagtttggacatagattcaatcaatgaagaactacaggattcaatctttgatatactaaactcaacctctgacttccaactggcatcatatgaaccatcaacatctcctccagaggatagcacataccaggaatcaaacactgacttcatgcaaaccacatattccaaaagcatacagatttctgagctctctaatggagctgagacagtctcttccagcttcctggaagaagtcactgagacttcagaaagcacagtggagtttccattagctgagacaactacattctcctctacctcctgagaagactttgaaacaagcctgtgactaccattctggatattgagtctttgtagaaaatcatgtaagtctaagatgctcccagcaaagaagaaagaacaaggaagtggtcctggatgagaaatgctgtgtcaggcacttatgagctctgcccttacctttgtgggcttaataaataaatgttcatcgc

SEQ ID NO: 1439 - DNA, 2681 bp, Rattus norvegicus
gagtgcagagagccaagccgggtgcaggagttttcttactgtgactataccatggaaaatcaattggctaagtcaattgaagaacgaacattccagtaccaggactctcttccgcccttgcccgttccttcgcttgaagaatcactgaagaagtaccttgagtcagtgaagccatttgcaaatgaagacgaatacaagaaaactgaagaaatagttcaaaagtttcaagatggagttggcaagacattgcatcagaagttacttgaaagggctaaaggaaaaagaaactggctggaagagtggtggctcaatgtcgcctacttggatgtgcgtattccatcacaactgaacgtgaactttgtgggtccgtctccccactttgaacactactggcctgcaagggaaggcactcagttggaaagaggaagcatactactgtggcacaacttgaactactggcagctgctaagaagagaaaaattgcctgtacataaatctggaaatactcctctagacatgaaccaattccggatgctgttttctacctgcaaggttccgggaatcactagagattcgattatgaattattttaagactgagagcgaggggcattgtccgacccacattgccgtgctgtgtcgaggcagagcgtttgtcttcgatgtcctccatgacggttgtttgatcaccccaccagaacttctcagacaactgacatacatctaccagaaatgctggaatgaacctgttgggcccagtatagcggcattaaccagtgaggagcgaactcggtgggcgaaggcaagagaatatctgattggtcttgatccagagaacttgactttattagaaaaaattcaatccagtttatttgtgtattccatagaagacaccagtccacatgcaaccccagaaaatttttctcaggtctttgaaatgcttcttggtggagatccagcagtgcgctggggtgacaagtcctataatctgatttcctttgctaacggaatatttggctgtagctgtgatcatgctccttatgatgcaatgcttatggtgaacattgctcactatgttgatgagaagctcctagagacggaagggagatggaagggttcagaaaaagtccgggatataccgttgccagaggagctggctttcactgtggatgagaagatactgaatgacgtctaccaagccaaagcccaacacctcaaagcagcatctgatttacagatagcagcatctaccttcacatcttttggcaaaaagctcactaagaaggaggcccttcaccctgacacctttattcagctcgctcttcagctcgcctactacagacttcatggacgccccggttgctgctatgaaacagctatgacaagatacttttaccatggccgaacagagactgtgcgatcttgtacagtggaggccgtcaggtggtgccagtccatgcaggatccttctgccagtctccttgaacgtcagcaaaagatgttagacgcttttgcaaagcataacaagatgatgagagattgttcccatggaaaaggatttgaccgtcaccttttaggccttttgctcatagcaaaagaggaaggcctccctgttccagaactgtttgaggatccacttttctccagaagtggaggaggtgggaattttgtgctgtcaacaagtctggttggttacttacgaattcagggagtcgtggttcccatggtacataatggatacggctttttctaccacatcagagatgacaggtttgtggtgacatgttcatcctggaggtcatgtcttgagactgatgcagaaaagttagtggagatgatttttcatgctttccacgatatgatacatctgatgaacacggctcatctttagagactcagagacatacaggtcacagaaactgggtacggagaatgggatggtgatacgacatggaaggaatgttgacttaaaggaaacctgttaatgcagggattagagagggatgcactctagatttattctaccttaaagccttctgttgcaacagcaatgcaaactcagacatagtgaatagaactatgcaatgttttaagcctcaacaatgcacatctgtatattttaacaatacaaatcctactctaatgttaaaatatttttgttggcacatgtgtaggttgcaagtcctctgtgaacataattatagagtatttctcaagcactttaatactttctaatggccagagggtataaaacccatggttagatgctaatttccctgacatcagtgccttctacatccagcacaggagtacaagcctatgagatttcatgggaaaaccactattgttcaatattgatctaaaatagctcctttgaacagacaaaagtatcaagttgtattagaaaagaatattagcaaaactcattatgatatgttgtaattaattttgtgaatataaaatcaaaacacttccatttaaatctacttggtagagttagtggctttaaagggttaaatgtcgagtatgattctcagaactttataattatttcccactgttattcaaaatgttagcatatagacattctcccattgtaattcagtgtttatattctcaaagaataaagcatccagaatccttgtaatttctcatttattttcaataaaaatgattcctgat

SEQ ID NO: 1440 - DNA, 1686 bp, Rattus norvegicus
gatccaagaatgggtgccgtggctgcctgaaaggccagtgcggaaagacgaaagggtccagaacaggcaacagttttgcaggttagcttcacatcggaaatcacttttgtctgagcatccttttagagtgtctgtcttagggatgcctctgtagtggtctctccatgtggtaaccactctacctgtgggagtctttcttcggagtcctctgaatgtgccaacatcccctgtaggctctattctaaaggccccttctcactctctgtcttagggtcaagaggttatctgtctccaactttgatttatattgagacaggaatctccaccctccccacatactggttactgttcctggtagagaagtctagggctggcaaaggcacaattgaagtcagggctggctcaatcgggccatcttctctgccccataccctccctacctctggctaagggggtcggagtgtgctcagcacaagaacccatcgaccttccccgctactgtccatggttgacaaggtctagaaaggagctctccaaactcaagtccgcaacccacaaagtgtttggcctggacaccagggccacgggggtccaggaacggaagaaacatgcctactcatccccctcatttatgtccatccgtcatttatgtcccacataatcctgcaaggaccgttgcttgctttcctaaagtcacttcctgactaatctctgcctgagcccgcttggaaggagggacccgggagctgataaagaaaagaaggtctccaggctctctgcagagtcagaaagtgtaactcaccggggcaagaagatgggacgcagctaaccgatctggagcccttgaggctgaagtttttaagcaccagggaaaggagaaagccactcccaagtccaaagtgtcaagtttcctcctccgctgattcgagagagggagccgcccctgctgtactagccaccccaccacaggcctgcgactggacacagcttgatgaggagggatcataggtccttatctctcccaattatgagtgctactcgggagtctgtgttagaagggactgctgctgctgctgctgctgctgctgctgctgctgctgctgctgctgctgctgctgctgcttgaaaaaattaaaaacaaaacaaaaccaaatgtacttggggaaatcagcactgggaagccccttctgagaaattcgaggtccaaaggcacttggagagccccaaactaaagccccgtagtgggacccctattgaaattctccactgagttctaagacagaagcccctcttggagacgcacaggctaagcactcctgggcagaatccttccctttccctgctcagccggtaccgcagcacccagcaccacagcacccttcccacgacctccttctctttcacctccttcacgcaagattcggggaggtggtgcaagcaggagtggaaagaaacagcagacatccattccctcctgggagacagagggcgcctctgtccactcctggccctagcccttcgggtgtcgtttgtgaaggggtggagccgtcgggaggagggtcggcagtaaagacaggtctccccacactgctccggggccacatttgcagcgcgcccttctgtcaagaacctgctccgacgtcagccgaggccaaccgtgagtatcctaccctgcttagataatcg

SEQ ID NO: 1441 - DNA, 1947 bp, Rattus norvegicus
ggcacgagaggactttgatcttcaggatgcctcagaagtggatttctgctctgctcctactgcagataagtttctgcttcagatctgggaactgtgggaaagtgttggtgtggccattggaatacagtcactggatgaatttaaagataatactggatgaacttgtacagaggggacatgaagtcactgttctcagaccttcatcttccgtctctcttgatcccaaaaaagcatctggtcttgtatatgaaacatctcctacaacttccaataatgatgaagtagaaaagtctttttacccagtgggtgatatgtggacatacgatgtgccaaaatatacatgtttgagatactacccatctttgaacaaaatgttcgggcaattttctgatttgtggttacagctttgtagagaagttgtttcaaacaaggaacttatagcaaaactaaaggaatcccagtttgatgtggttctttcagatgctgttggtccctgtggtgagctgatagctgagatactgcagttaccatttgtgtacagtcttcgctttgccaccgcccctggaatagaaaagtacagtgcaggacaacccttccctccctcttatgtacctattattttgtcaggatttagtggtcaaatgacattcatggagagagtggaaaatatgctatgtttactttattttgattcctggttcgagtcatttcctgctaaggattgggatccatttttcagcgaaattttaggaagacccactacaatggttgacacaatgaagaaagcagaaatatggctcattcggtcctactgggacttggagtttccccgcccatccttgccaaacattgagtttgttggaggacttcactgccaacctgccaaaccattacctaaggaaatggaagactttgcacagagctcaggagaacatggtgtgtgggtgttttctctggggtcgatgatcaggaacataacacaagaaagggctaacacaattgcatcagccctggcacaaattccacaaaaggttttttggagatttgagggcaagaaaccagacaccttaggacccaatactcgggtgttcaagtggataccccagaatgaccttcttggtcatccaaaaactaaggcttttgtaactcatggtggagccaatggcatctatgagtcaatccattatgggatcccccccatggttggcatccctttatttgcagaacaacgtgataacgttgctcacatggtagccaaaggagcagctgtttctatagattttcatacaatgtccagttcagatttgctcaacgcactgaaggcagtcatcaataacccctcctataaaaagaaagtgatgtggttgtcagccattcaccatgaccagcctctgaagcctctggacagagcagtcttctggattgagtttgtcatgcgtcacaaaggggccaagcatctgagaccacttgcacataaccttgccctggtatcagtacactctctggatgtgattggattcctgcttgcctgtgtgctggccattgttttacttgctgtaaaatgctgtctgtttctttaccgattttttgtaaaggtggcaaagaataaaagggactagggttctttaagaaggaaggctgtgatctgtggtcgtgatgggcatgactactccctttattgctggaactatatatcagatgctccttgttttagaagacattgagctaattgatttatctatagatgtcacactataggttaagaaagtaaccgttttaaatctttattttctcaaatccaccgttttcatattgattctcgatgtgatagtgctgaggataatgataatccctgaaacaccaacttgcttatgggcaaagatataggaagcctaaactttttactgtgaattttcagatatttataaaataaaattgaataaaatt

SEQ ID NO: 1442 - DNA, 1700 bp, Rattus norvegicus
agtggatggagaccaagtccatcaattagaagataagtctcaaatggagaaccggtgcctccccaagaaagttccaggtttctgttcctttcggtatggactggctatccttttgcacttctgtaacattgtcatcatggctcagcgagtgtgcctgaacctcacaatggtagccatggtgaataaaacagagccaccccatttatctaacaagtctgtagcagagatgctggataatgtaaagaaccctgtgcattcctggagtcttgatattcaagggcttgttctcagttctgtcttcttgggtatggttgtgattcaagttcctgttgggtacctatctggagcatacccaatggagaaaataattgggtcttcattgttcctcagctctgtgctgtccctgctcatcccaccagctgcacaagtcggagcagctttggtcattgtatgccgagtactccaaggaatagcccagggagcagtgtcaacaggccagcatggaatatgggtcaaatgggcacctcccttggaacgaggcagacttacctctatgactctatcagggtttgtaatgggaccatttattgccctgcttgtgagcggcttcatctgtgatcttctgggttggcccatggttttctacatctttggtattgttgggtgtgttctgagtcttttctggttcatccttctctttgatgaccccaacaaccacccatatatgagcagcagtgagaaggattacatcacatcctctctcatgcaacaggtgcactcaggcagacaatctctgccaatcaaagctatgcttaagtctcttccactctgggccattatcctcaatagctttgctttcatatggtcgaacaatcttctggttacatacacgccaacatttattagcaccacgcttcatgttaatgttagagagaatgggctgctgtccagcctcccctatctgcttgcctacatctgtggtatcgtagcaggtcagatgtcagacttcctcctgtcaaggaagattttcagcgtagttgctgtccggaaactcttcaccacactagggattttctgtcctgtgatttttgtcgtgtgcctgctctacctgagctacaacttctacagcaccgtcattttccttacacttgccaactcgacacttagcttttccttctgtggacaacttatcaatgccttggatattgctcccagatattatggatttctaaaggcagtcacagctttaattggaatatttgggggcctaatttcttcaactcttgctgggttgatccttaatcaggatccggaatatgcttggcataaaaacttcttcttgatggcaggcattaacgtgacatgcctggctttctaccttctgtttgcaaaaggagatattcaggactgggctaaagaaacaaaaaccacacggctgtgaagttagtagaagagtgagcacctgagaaacatgaggtcagcatccatattgaaaggaagaggattctgtgtgggactgcagtcatgggagtcatgaacacctgaagaccggtagcctgaagcttttaagggagtcattgcctcccactttagtctgagtgattcttttgcactgtgtattgtgtgtaacaagttatacttctgactttaaagaggaatctgtctgtcttcctatgatccaataaacaaacgtattcggg

SEQ ID NO: 1443 - DNA, 4871 bp, Rattus norvegicus
ttttaagcgccacggggacccgctggcgctgccatccctcccgggttcctggtcgcgccacgatggggcacctgcctagggaaaggcgcgggggccgccgcctgctacctctgctcgggctctttgtgctgctcaagattgtttcaacgttccacgtgactgtccgagacgacaacaacatcgttgtgtctttagaagcttctgatgtagtcagcccaacctccgtgtatgttgtgagggtagctggcgaatccaaaaactatttcttcgaatttgaggaatccaatggcacactgcctcctcctgtggtctttaaggccacgtatcatggtctttattacatcatcagtctggtggtagtcagtgggaatgtggtcaccaaaccatcccgatcaatcaccgtgctgacaaaacccttgcccgtaaccagtgtgtctatatatgactataagccttctcctgagacaggagtactgtttgaaattcactatccggaaaaatacaacgtgttcagcagagtgaacatcagctactgggaggggaaggatttcaggacgatgctgtacaaagacttcctgaaggggaaaaccgtgtttaatcactggctcccggggatctgctacagtaacatcactttccagctggtttctgaggcgacctttaacaaaagcaccctggtggagtgcagtggtgtgagtcacgaacccaaacaacacagaacagcgccgtatccccctcgaaacatctctgttcgctttgtcaacttgaacaagaacaactgggaagaaccaagcgggagcttccccgaggactcgttcatcaaaccgcaagacgcgataggaagagacagacccttccatttccccgaggaaacccctgagacgcccgccagcaatgcgtcttccggctggcctgacccgaacggcactgagtatgagagcacatctcagccctactggtgggacagtgcatccgcggcccctgaaaacgaggaggacttcgtcagcgtgctgccagcggactatgacactgaggccacgctcggcaggacagagaaacccacagctgaccctttctctgccttccccgtgcagatgactctgagctggttaccaccaaaaccgcctacagccttcgatggcttcaatatcctcatagagagggaagggaactttaccgactatttgacagtggatgaagaagcccacgagtttgttgccgaactgaaggagcctggaaagtacagactctcagtgacaaccttcagctcctcgggagcctgtgagactcggaaaagccagtcagcaaaatcgctcagcttctacatcagccccacaggagagtggattgaagaactgactgagaaaccgcagcacgtgagtgtccacgtcttaagctcaaccactgccttgttgtcgtggacatcttcccaggagaactacaacagcaccattgtgtctgtggtgtccctgacatgccagaaacagaaagagagccagcggctggagaagcagtattgtacccaggtgaactcaagcaaacctgtaattgagaacctggttcccggtgcccagtaccaggttgtgatgtacctaagaaaaggccctttgattgggccaccttctgatcctgtgacatttgccattgttcccacggggataaaggatttaatgctctatccattgggtcccacggcagtagtgctgagctggacccgaccttacttgggagtgttcagaaaatacgtggttgaaatgttttatttcaaccccaccaccatgacctccgagtggacgacctactacgaaatagcagcgaccgtctccttaacatcgtccgtgagaatagcaaatctattgccggcgtggtactacaactttcgcgtaaccatggtgacgtggggagatccagaactgagctgctgtgacagttccaccatcagcttcataacggcccccgtcgctccagaaatcacgtctgtggagtacttcaacagcctgctgtacatcagctggacctacggggacgccaccactgacctgtcccattcgagaatgctacactggatggtcgtggcagaagggaggaggaaaattaaaaagagtgtgacacgcaatgtcatgacggccatccttagcctgcctccaggagatatctacaacctgtctgtcacagcctgcactgagagggggagtaacacctccatgctccgccttgtcaagctagaaccagctcctccaaaatcactcttcgcagtgaacaaaacgcagacatcggtcaccctgctttgggttgaggagggcgtagctgatttctttgaagtcctctgtcagaagctcgggtctggccacgatggcaaactccaggaaccggtagctgtttcctcccacgtggtgaccatctccagcctcctcccagccactgcctacaactgcagtgtcaccagcttcagccacgacagtcccagtgtccctacgttcatagctgtctccacaatggttacagaggtgaaccctaatgtggtggtgatctcggtgctggccatcctcagcatacttttaattggactgctgttagtgacccttgtcattctgagaaagaagcacctgcagatggccagggagtgtggggctggcacgtttgtcaattttgcatccttggagagggaagggaaactcccctacagttggcgtaggagtgtctttactttcttaaccctgctgccctcatgtctgtggactgactatctgttggcattttatattaacccttggagtaaaaatggcttaaagaagaggaaactgacgaaccctgttcagctggacgattttgattcttacatcaaggacatggccaaggactctgactataaattctctcttcagtttgaggagttgaagttgattggactggatattccacactttgctgcagatcttccgctgaaccgatgtaaaaaccgctatacaaacatcctgccgtacgacttcagcagagtgaggctggtctccatgaatgaagaagaaggagcagactacattaatgccaattatattcctggctacaactcacctcaggagtacattgccacccagggaccactgccggaaaccagaaatgatttctggaagatggtcctgcagcagaagtctcgcatcattgtcatgctcactcagtgcaatgagaaaagaagggtaaaatgcgaccactactggccattcacggaagaacccattgcttatggagacatcaccgtggagatggtctctgaggaagaacaggaggactgggccagcagacacttccggatcaattatgctgacgaggcccaggatgtgatgcactttaactacacggcctggccagaccatggcgtgcctccagcaaatgctgccgagagcatcctgcagttcgtgtacactgtccggcagcaagccaccaagagcaaaggacccatgatcatccactgcagcgcgggcgtgggacggacaggcaccttcatagcccttgacaggctcttgcaacacatccgagatcacgaatttgtggacatcttggggctggtgtcagaaatgcgctcataccgaatgtcgatggtacagacagaggagcagtacatcttcatccatcagtgcgtgcagctgatgtggctgaagaagaagcaacagttctgcatcagtgacgtcatctacgagaacgtcagcaagtcctagttcagactcgggagcggtgaggccatgatgtctacccatcctcccttgcttccagaggttttataggggcctttagtcactttgtcaaatcgcgtccccgctgcgcagtttgtggacaaggaggtgatttaacctcctagaaccgagaagacttagccttaaggagcctacaataccgtttggagtcttttcacttctagacgtttgatggtccaaattcactaggatttccagaaatgctcctcctcgaagggcgggaagtgcccttcctgatggttcagtcggctctttgctgcttgggctgggtttggttttttcttttttttaagtgcaataatttctgtataatcgtgattttttttttacattcgcaattcagaatgttgaattgttatccgcccacatcactgatcagtgccacagccttgggaaggccttatcgcagagttttatctcaccactgaagaggcatggctacacacaggaagactcggtgacaaatcctcaaaggaaatgagcgcgtgtgtccctccctccaacctctcgaagctatgggtcaggagtaggtgggcagagagagaagagaggggttctactcacacgtcagccggtttatctcttcctatttcgaatatgagaacctgtgtttcgaagtagagtaggaaaaacattacttgtctgacttgtcgtagtgggtttcttccttgttgacagttgggagtttcttccgtggctcttttgaactagtgtcactgtcatggtccttttcaaacagccagagctgactcaacagttttgagtctgactctgaactctgagaaatcttggtgcctagccttctttatttttctgtccacccgtgtacacaagaacagtttctccaagagctataggctgtaaaaatgcactttctttccccacccagaggagctgggaattcagaagtcaggacaacgaactcagcatgctaggacagtcactggacaccgtcccttaagaataccgttgagcgtctccgtggattccgacaggatattctctgggttctttgcatttctgttgtcagactcattttaacccgtgtagctagtggcattttattctttggattttgtatgattaaagtacatgattatgtgttgtgaccagcgccgcgaa

SEQ ID NO: 1444 - DNA, 2254 bp, Rattus norvegicus
agagaatggagggacacgtagaggaaggctctgaacttggggagcagaaggtcctgattgataatcctgctgacattctggtcattgccgcgtatttcctgctggtcattggtgttggcttgtggtctatgttcagaaccaatagaggcacagttggtggctacttcttggcaggacggagcatggtgtggtggccggttggagcctctctgttcgccagcaacatcggcagcggtcattttgtgggcctggcggggactggtgcagcaagtggcttggccgtggctggatttgagtggaatgcgctctttgtggtgttgctcctcggctggctcttcgtgcctgtgtatctgaccgccggagtgattaccatgcctcagtacctccgcaagcgctttggtgggcgccgtattcgcctctacctgtccgtgctctcgctttttttgtacattttcaccaagatctcggtggatatgttctccggagcagtattcattcaacaggccctgggctggaacatttacgcttctgtcatcgcactcttgggcatcaccatgatttatactgtgacaggagggctggcggcactgatgtacacagacactgtgcagaccttcgtcattcttgccggggccttcatcctcactggttatgctttccatgaagtgggcgggtactcaggtctcttcgacaaatacctgggagcagtgacttcactgacggtgtccaaggatccagctgttggcaacatctccagcacctgctatcagccgaggcccgactcctatcacctgctgcgtgaccctgtgacaggagggctgccgtggcctgcgctgcttctggggcttaccattgtctcaggctggcactggtgcagtgaccaggtaattgtgcagcgctgcctggctggaaagaatctgactcacatcaaggctggatgcatcctgtgtggttacctgaagctgatgcccatgttcctcatggtcatgccaggcatgattagccgcattctttacccagatgaggtggcctgtgtggtacctgaggtgtgtaagcgggtgtgtggcactgaggtgggctgctctaacatcgcctacccacggcttgttgtgaagctcatgcccaatggtctgcgtggactcatgctggcagtcatgctggccgccctcatgtcttctctagcgtccatctttaacagcagcagcacactcttcaccatggatatctacacacgcctgcggcctcgggcgggtgatagggagctgctgctggttggaaggctttgggtggtgttcattgtggcagtgtccgtggcttggctgccagtggtgcaggcagcacagggcggccagctcttcgattacattcagtctgtctccagctacctggcgcctccagtgtccgctgtctttgtgctggcactctttgtgccccgtgttaatgagaagggtgctttctggggactcattgggggcctgctgatgggcctagctcgtctcatacccgagttcttctttggcacgggcagctgtgtgcgaccctctgcatgcccagccatcttctgccgggtacactacctctacttcgccatcattctcttcttctgctccggcttcctcacactcgcaatctcccggtgcaccgcacccatccctcagaagcatctccaccgcctggttttcagtctccggcacagcaaggaggagcgggaggatctggatgctgaagagttagagggtccagcccctcctcctgtgcagaacgggtgccaggaatgtgcaatggggattgaagaggtccagtccccagctccaggcctgctccgccagtgcttgctctggttctgtgggatgagcaagagtgggtcagggagtcctccacccactaccgaggaggtggctgcaaccaccaggcggctagaggacatcagtgaggatcccagctgggcccgagtagtcaacctcaatgccctgctcatgatgactgtggctgtgttcctctggggcttttatgcataaagtcaagtgtgttggttaccatgagttgcaaccagggcatgtctgagcctcatgaaaagtgagggtgaagaacttgtagtggatcccagaaaagggcaaaaatacggcaggaaggaactggttcccttcctctttacctggggtccagtccatttgattggttgtcacttcccacaagatggtggccaatttgtcatagatgtttgcctatgcaaaaataaagctgcccttctaac

SEQ ID NO: 1445 - DNA, 806 bp, Rattus norvegicus
gcttgaatctaatacgtcgatcataccatgttgaagatgagcgggtggcagcgacagagccaaaataacagccggaacctgaggagagagaaaccggtccaattacagtcatggcagctgagtctctgcctttcgcctttgagacagtgtccagctgggagctggaagcctggtatgaggatctgcaggaggtcctgtcctcagatgaaattgggggcacctatatctcatccccaggaaacgaagaggaagaatcaaaaaccttcactactcttgaccctgcatccctagcttggctgactgaggagccagggccagcagaggtcacaagcacctcccaaagccctcgctctccagattccagtcagagttctatggctcaggaagaagaagaggaagatcaaggaagaactaggaaacggaaacagagtggtcagtgcgcagcccgggctgggaaacagcgactgaaggagaaggagcaggagaatgagaggaaagtggcacagcttgctgaagagaacgagcggctcaacgaggaaatcgagcgcctgaccagggaggtagagaccacacggcgggctctgatcgaccgcatggtcagtctgcaccaagcatgaactgttggcatcacctcctgtctgtctctcccggagtgtacccagcaccatcacgccagtgccaagcatgtaatctccagtgcacatgctgaggaggggactgagggtagaccaaaggagaggggcttgtacactgtacattctttattcattccatacccagtaaagtgactttgtgtgaaaaaaaaa

SEQ ID NO: 1446 - DNA, 6060 bp, Rattus norvegicus
tcctggctataagtcaccatggcccagcaggctgcagacaagtacctctatgtggataaaaacttcatcaataacccgctggcccaggccgactgcggtgccaagaagctggtatgggtgccttccaccaagaatggctttgaaccagccagccttaaggaggaggtgggagaagaggccattgtggagctggtggagaatgggaagaaggtgaaggtgaacaaggatgatatccagaagatgaacccacccaagttctccaaggtggaggacatggcagagctcacgtgcctcaacgaagcctcggtgctgcacaacctcaaggagcgatactactcagggctcatctatacctattcaggcctgttctgtgtggtcattaatccttataagaacctgcctatctactcagaggagatcgtggacatgtacaagggcaagaagaggcacgagatgccgccccacatctatgccatcacagacactgcctacaggagcatgatgcaggaccgagaagatcagtccatcctttgcacgggtgagtctggagcaggcaagacagagaacaccaagaaagtcattcagtacctggcacatgtggcctcctcacacaagagcaagaaggaccagggggagctggagcgccaactgctgcaggccaaccctatcctagaggcctttggaaacgccaagacggtgaagaatgacaactcttcacgatttggtaaattcattcgtatcaactttgatgtcaacggctacatcgttggggccaacattgagacttatcttctggagaaatctcgtgctatccgccaagccaaggaggaaagaaccttccacattttttactacctgctgtctggggccggagagcacctgaagactgatctcctgttggagccatacaataaataccgcttcctgtccaacgggcatgtcaccatcccagggcagcaggacaaggacatgttccaggagacaatggaggccatgaggattatgggtatcccagaggatgagcagatgggcttgctgcgggtcatctctggcgtccttcagcttggcaacattgtcttcaagaaggaacggaacactgaccaggcgtccatgccagataacacagctgctcaaaaggtgtcccacctcctggggatcaatgtgaccgacttcaccagaggcatccttaccccgcgcatcaaggtgggcagagactatgtgcagaaggcacagactaaagagcaggctgactttgccatcgaggctttggccaaggctacctacgagcggatgttccgctggctggtgcttcgcattaacaaagctctggacaagaccaagaggcagggcgcctcatttatcgggatcctggacatcgctggcttcgagatctttgatctgaactccttcgagcaactttgcatcaactataccaacgagaagctgcagcagctgttcaaccacaccatgttcatcctggagcaggaggagtaccagcgagagggcatcgagtggaacttcatcgactttggccttgacctgcagccttgcatcgacctcattgagaagccggcgggtcccccaggcatcctggccctgttagatgaggaatgttggttccctaaagccactgacaagagcttcgtggagaaggtggtgcaggagcagggcacccaccccaagttccagaagcccaagcaactgaaggacaaggctgatttctgcatcatccactatgcaggcaaggtggactataaggccgatgagtggctgatgaagaacatggaccctctgaacgacaacattgccaccctgcttcaccagtcctcagacaagtttgtctctgagctgtggaaggatgtggatcgaatcattggcttggaccaggtggctggaatgtctgagacagcgctacccggtgccttcaagactcggaagggcatgttccgtactgtggggcagctgtacaaggagcagctggccaagctcatggccacactgaggaataccaaccccaactttgtctgctgcatcattcccaaccacgagaagaaggccggcaaactggacccacacctggtgctggaccagttacgctgcaatggcgtccttgaaggcatccgaatctgccgccagggctttcccaacagagtggtcttccaggagttccggcagaggtatgagatcctcacacctaactccattccgaagggcttcatggatgggaagcaggcgtgtgtgctcatgatcaaagccttggagcttgacagcaacctgtaccgcatcggccagagcaaagtgttcttccgttccggagtcctagctcacctggaggaagagcgggacctgaagatcactgatgtcatcattggcttccaggcctgctgcagaggctacctggccaggaaggcctttgccaagaggcagcagcagctgactgccatgaaggtcctacagaggaactgtgctgcatacctcagactccggaactggcagtggtggaggctcttcaccaaggtcaagcccctgctgaactcaataaggcatgaggatgagcttttagccaaggaggcggaactgacaaaagttcgagagaagcatctggctgcagagaacaggctgacagagatggagactatgcagtctcagctcatggcagagaagttgcagcttcaggagcagctgcaggcgaaaaccgagttgtgtgctgaggctgaggagctccgggcccgcctgacagcgaagaagcaggagttggaggagatctgccatgacctggaggccagggtagaggaggaggaggagcgctgccagtatctgcaggcagagaagaagaagatgcagcagaacatccaggaactcgaggagcagctggaggaggaggagagtgcccggcagaagctgcagcttgagaaggtgaccactgaggccaagctgaagaaactggaggaggaccagatcatcatggaggatcaaaactgcaaactggccaaggagaagaagctgctggaagacagagtagctgaatttactacagacctcatggaagaggaggagaagtccaagagcctggccaagctcaagaacaagcatgaggcgatgatcaccgacctggaagagcgccttcgtagggaggagaagcaaaggcaggagttggagaagacccgccgcaagctagagggagactccacagacctcagcgaccagattgctgagctccaggcgcagatcgcagagctcaagatgcagctggccaagaaggaggaggaattgcaggctgccttggccagagtggaagaagaagctgctcagaagaacatggccctgaagaagattcgagaactggaaactcagatctctgagctgcaggaagacctggagtcggagcgtgcctgcaggaacaaagctgagaagcagaaacgggatcttggagaagagctagaggctctgaagacagagctggaggacactctggactccaccgctgcccagcaggaactgaggtcaaagcgtgagcaggaagtgagcatcctgaagaagactcttgaggatgaggccaagacccatgaggcccagatccaggagatgaggcagaagcactcgcaggccgtggaggagctggccgagcaattggagcagactaagcgggtaaaagctacccttgagaaggctaagcagaccctggagaatgagcggggagagctggccaatgaggtgaaggccttgctgcagggcaagggcgactcggagcacaagcgcaagaaggtggaggcgcagctgcaagaactgcaggtcaagttcagcgagggagagcgtgtacggaccgagctggctgacaaggtctccaagctgcaggttgaactggacagcgtgaccggtctccttaaccagtcggacagcaagtccagcaagcttacaaaggacttctctgcgctggagtcccagctccaggacacacaggagctgctccaggaggagaaccggcagaagctgagcctcagcaccaagctcaagcagatggaggatgagaaaaactccttcagagagcagctggaggaggaagaggaggaggccaagcgcaacctggagaagcagatcgccaccctccatgcccaggtgactgatatgaagaagaagatggaggacggtgtagggtgcctggagacagcagaggaggcaaagcggaggcttcagaaggacctggaaggcctgagccagcggcttgaggagaaggtggctgcctatgataagctggagaagaccaagacccggcttcagcaggagctggatgacctgctggtggacctggaccaccagcggcagagcgtctccaacctggaaaagaagcagaagaagtttgaccagctcctagctgaggagaagaccatctcagccaagtatgctgaggagcgagaccgagctgaagctgaggcccgtgagaaggagacaaaggcactgtcactggcccgagcacttgaggaggccatggagcagaaggcagagctagaacggctcaacaagcagttccgcacggagatggaggacctcatgagctccaaggatgacgtgggcaagagtgtccatgagctggagaagtccaacagggcattggagcagcaggtcgaggagatgaagacccagctggaggagctggaggatgagcttcaggccactgaggatgccaagctccgtctggaggtgaacctgcaggccatgaaggcccagtttgagcgggatctgcagggccgggatgaacagagcgaggagaagaagaagcagctggtcagacaggtgcgggagatggaggcggagctggaggatgagaggaagcagcggtccattgccatggctgctcgcaagaaactagagatggatctgaaggacctggaggctcacatagacacagccaacaagaaccgggaggaggccatcaaacagctacggaagcttcaggcccagatgaaggactgcatgcgggacgtggacgacacgcgagcctcccgggaggagatcctggcccaggccaaggagaatgagaagaagctcaagagcatggaggccgagatgattcagctgcaggaggaactggcagccgccgagcgtgctaaacgccaggcccagcaggagcgggatgagctggccgatgagatcgccaacagcagtggcaaaggggccctagcattggaggagaagcggcgactagaggccctcattgccctgctggaggaagagctggaggaggagcagggcaacacagaactgatcaacgaccggctgaagaaggccaatctgcagatcgaccaaataaacaccgacctgaacctggagcgcagccacgcccagaagaacgagaatgcgcggcagcagctggaacgccagaacaaggagctcaaggccaagctgcaggagatggagagtgctgtcaagtccaaatacaaggcctccatcgctgccttggaggccaagattgcacagctggaggagcagctggacaacgagaccaaggagcgccaggcagcctccaagcaggtgcgccgggcggagaagaagctgaaggatgtgctgctgcaagtggaagacgagcggaggaacgcggagcagttcaaggaccaggccgacaaggcatccactcgcctgaagcagcttaagcggcagctagaggaggccgaggaggaggcccagcgggccaatgcctcccgccggaagctgcagcgtgagctggaggatgccacagagactgccgatgctatgaaccgagaggtcagctccctgaagaacaaactgaggcgtggggacatgccatttgttgtgacccgccgaattgtccggaaaggcactggcgactgctcagacgaggaggtcgacggtaaagcagacggggctgatgccaaggcgaccgagtagggacttctgctacccaagacggatggacagacggctccacctcccttccccagccctccacacccctgccttgagactgctctgcccatgcccctcttcctcccaggccttcttgagggcattggcttcctctgctgcatccccttccagctccct

SEQ ID NO: 1447 - DNA, 3945 bp, Rattus norvegicus
cgcggcggccacggcttgaggcgacggggcgaagatgctgaagttccaaacagttcgagggggcctgaggctcctgggtgtccgccgatcctccacagcccccgttgcctccccaaatgtccggcgtctggagtacaagcccatcaagaaagtaatggtggccaacagaggtgagattgccatccgagtgtttcgtgcctgcacagagctgggtatccgcacagtggctgtctactcggagcaggacacaggccagatgcaccggcagaaagctgatgaagcctaccttattggccgtgggctggctcctgtgcaagcctacctgcacattccagacatcattaaggtggccaaggagaatggtgtagatgctgtgcaccctggctatgggttcctctcagagagagcagactttgcccaggcctgccaagatgctggagtccgattcattggtccaagcccagaggtggtccgcaagatgggagacaaggtggaagcccgggccattgccattgctgcaggcgttccagtggtccctggcactaattcccccatcaattccctgcatgaggcacacgagttctctaacacctatggtttccctattatcttcaaggctgcctatggaggtgggggccgtggcatgagggttgtgcatagctacgaggagctggaagagaattacacccgggcctaccctgaggccttggcagcctttgggaatggggcattgtttgtggagaaattcattgagaagccaagacacattgaggtgcagatcctaggggaccaatatgggaacatcttgcacttgtatgagcgggactgctccatccagcggcggcaccagaaggtggtagagattgcccctgctacccacctggacccccaacttcggtcacgcctcaccagtgactctgtcaaacttgccaagcaggttggctatgagaatgcaggcactgtggagttcctggtggacaagcatggcaagcactacttcatcgaggtcaattcccgcctgcaggtggagcacacggtcactgaggagattacagatgtggacctggtccatgctcagatccatgtgtccgaaggccggagcctgcctgacctaggcctgcggcaggaaaacatccgaatcaatggttgtgccattcagtgtcgggtcaccactgaggaccctgcacgcagcttccagccagacactggccgcattgaggttttccggagtggtgagggcatgggcatccgcctggacaatgcctcagcattccagggagctgtcatatccccccactatgactccctgctcgtcaaagtcattgcccatggcaaagaccaccctacagctgccaccaagatgagcagagccctggcggagttccgtgtccgaggtgtaaagaccaacatccccttcctgcagaatgtgctcaacaaccagcagttcctagcgggcattgtggacacccagttcatcgatgagaaccccgagctgttccagctgcggcctgcacagaaccgggcccagaagttgctacattaccttggacacgtcatggtcaatggccctaccactccaatccccgtcaaggtcagtcccagccctgtggaccccattgttcctgtggtgcccataggcccacccccagctggtttcagagacatccttctgcgagaggggccagagggctttgccagagctgtgcggaatcaccaggggctgctgctaatggacacaaccttccgggatgcccaccagtcactacttgccactagagtgcgcacacacgatctcaaaaagattgcaccctacgttgcccacaacttcaacaacctcttcagcatagagaactggggaggagccacatttgacgtggccatgcgcttcttgtatgagtgcccctggcggcggctccaggagctccgggagctcatccccaacatcccattccagatgctactgaggggggccaatgctgtgggctacaccaactaccctgacaacgtggtcttcaagttctgtgaggtggccaaagagaatggcatggacgtcttccggatctttgactcccttaactacctgccaaacatgctgctgggcatggaagcagctggcagtgctgggggtgtggtggaagctgccatctcctacacgggtgacgtggctgaccccagtcgcactaaatactcactggagtactacatgggcttagctgaagaactggtgcgagccggcactcacatcctctgcattaaggacatggcaggcctgctgaagcctgcagcatgcaccatgctggtcagctccctccgggaccggttccccgacctcccactgcacatccatacccatgacacatcagggtcaggtgtggcagccatgttggcctgtgcacaagctggggctgatgttgtggatgtggcagtcgactctatgtctgggatgacctcacagcccagcatgggggccctggtggcctgtaccaaagggactcctctggacacagaggtacccctggagcgtgtgtttgactacagtgagtattgggaaggggctcgggggctgtatgcagcctttgattgcacggctaccatgaagtctggcaactcagacgtgtatgagaatgaggatccagggggccagtacaccaacctacacttccaggcccacagcatgggacttggctccaagttcaaggaggtcaagaaggcctatgtggaggctaaccagatgctgggggacctcatcaaggtgacaccatcctccaagattgtgggggatctggcccagttcatggtgcagaacgggttgagccgggcagaggcagaagctcaggcagaagagctgtccttcccccgctctgtggtggagttcctgcagggctacattggcattccccatgggggtttccctgaacccttccgttctaaggtgctaaaggacctgccaaggatagaaggagggcctggagcctccctccctcccttgaacctgaaggagctggagaaggacctgattgataggcatggagaggaggtgaccccagaggacgttctctctgcagccatgtaccctgatgtctttgctcagttcaaagacttcacggctacctttggccccctggatagcctgaatactcgtctctttcttcaaggacccaaaattgcagaggagtttgaggttgagctggaacggggcaagaccttgcacatcaaagccctggctgtaagcgacctgaaccgtgctggccagaggcaggtgttctttgaactcaatgggcagcttcgatccattctggttaaagacacccaggccatgaaggagatgcacttccatcccaaggccttgaaggatgtgaagggccaaattggggcccctatgcctgggaaggtcatagacgtcaaggtggcagcaggagccaaggtggttaagggccagcccctctgtgtgctcagcgccatgaagatggagactgtggtgacttcgcccatggagggcactatccgaaaggttcacgtgaccaaggacatgactctggaaggcgatgacctcatcctagagattgagtgatcttactccagactggcagcctggccaaccctaccccaagcctctcaacagaagctgtgcagccagggcaggcccaggcagtacctgagggctaggccttgaggtcctgtcccatgggacagcacacacactacctgcaatggccctcccattcccttcagctatttgtccttgtcttgctggcaggcagttctcacatattcatctcttgccaaataagggtctgctcctcgtgggagaccacaggtgtacagtaggtggccttgtacctgggagaggggttctacctctgggggtagagggaagaagacctaattcataggtcctgggaaatttgctcaataaaagtggccttcccttgccctccacaaaaa

SEQ ID NO: 1448 - DNA, 1998 bp, Rattus norvegicus
ggtgctgctgctgcatgtctgactgagaagggagccgagcatctgaggagcaagacatcagaaggctggagtcccttccctgactaggccagagctaaaaggacaaggctcagggctagcctctgcctatctagttcttttctccctgaagcttacaccatcctgtgggagccgatgcccgtctcattttgactcagagtctgtccctctgcttgtcttctacaaaccatgtggctgtacctgctggcactggtgggcctgtggaacctcctgcgcttgttcagggagaggaaggtggtaagccatctccaagacaaatatgtcttcatcacgggctgtgactcaggctttgggaacctgctggccagacagctggacaggagaggcatgagggtgctggctgcatgtctgactgagaagggagccgagcagctgaggagcaagacatcggacaggctggagacagtgatccttgatgtcaccaagacagagagtattgtggcagccactcagtgggtgaaggagcgagttgggaacacaggactctggggcctggtcaacaatgctggcatctccggccacctgggtcccaatgagtggatgaacaaacagaacattgcaagtgtgctggatgtgaacctgttgggcatgatcgaggtgactctgagcacggtgcccttagtgaggaaggcgaggggccgtgtggtcaacgttgccagcatcgcaggccgactgtctttttgtggtggtggttactgcatctccaagtatggtgtagaggccttctcagactccctcaggagagagctctcctattttggggtcaaggtggctattgtagagcctggcttcttcaggactgatgtgaccaatggtgtcacattatcatcaaacttccagatgctgtgggaccagaccagctcagaagtcagggaagtctatggcgagaactacctggcatcttatctgaaaatgctaaatggattggaccagaggtgcaacaaagatctgtctctggtgactgactgcatggagcacgccctgacttcctgtcaccctcgcacccggtactcagctggttgggatgccaagttcttctacctccccatgagctatctgcccacctttcttgtggatgcccttttctactggacttctccaaagcctgagaaagctctctgaagtctttacctatgtacataactgaggagatgttggtacagtgttagggaggggatcctgaggaggaggtcggagtgctgaggagggagggaggtcattcctctggggtttagtccacactcttcattttgctaattttcctgtgctactactcaaggctgactcgactgacccaagaaatagccaaagaattctgcgaagaagttcaaatacaaaagtgctggcagttgcctagcctctgggcaccatgacctaccatggcgatccacacaaatggggagtttgagaccagcttgtaccaaacactgccctgggtccccctgtgcaggaagtgcacatgccctggctagtttgtaccctatgcagcatagaagtgtccctgctctgaagtcacctgtgaccctggtgtcaggtttgagaagaatcactaataattctaacactcatgcttgaaggccaggtcgcagcctgggtgggagagtcggttacttgtggtgagaatatagtagaggatagagacattaattttttttaaatttactttgaagtcatggctcttcttttcttttttggagtcttttcctttttagagcatagcatgaggtgacctcttgttccctgtgatttaaacaatggcattgctggttggtgaggtttggattgcaggggtaaggggaatgtcctgagaagggtgtgcataggccagcaggaatttccttgcccgtctcagcccttctagccactgaggtgggaataactgctgtccattcaaaacttaacaacaacccctaaggcataagagcatgcatgcaggcc

SEQ ID NO: 1449 - DNA, 1139 bp, Rattus norvegicus
cctgctgtagcttgcccatctcccgctcccacaatccggcgtgatggctgccgccgttcctggcgccgtttcgctctccccactgctgtccgttctccttggcctgctgctcctctctgctcctcatggcgccagcggcctgcacacgaagggcgcccttcccttggacacagtcactttctacaaggtcattcccaaaagcaagttcgtcttggtgaagttcgacacccagtacccctatggagagaagcaagatgagtttaagcgtctggctgagaactcagcctccagcgatgatctcttggtggcagaggtggggatctcagactatggtgacaagctgaacatggagctgagtgagaagtacaagctggacaaagagagctacccagtcttctacctcttccgggatggggactttgagaatcctgtcccatacagcggggcagttaaagttggagccatccagcgctggctcaaggggcagggagtctatctgggcatgcctggatgtctgcctgcgtacgatgccctggcgggccagttcatcgaggcctccagcagagaggcccgccaggccatcctgaaacaggggcaggatggcctctcaggtgtgaaggagacagacaagaagtgggccagtcagtacctgaagatcatggggaagatcttggaccaaggtgaagacttcccggcctccgagctggcccggatcagtaagctcattgagaacaagatgagtgagggtaagaaggaagagctgcagaggagcctcaacatcctcaccgccttccgcaagaaaggcgccgagaaggaggagctgtgagggcaccaggctgctagggtttgctgagggcggggagggagagccgcctgctgactgtggggccctgtgggtggagggggcagtggagcaaagcagtcctgagccagagacctgtgccccgagtgcctggacactgaggctgctgagaccataccctggacatccttggtgcagtttgtggggagcctgtgtgccaagacaagatggctgtgtccccacaggagctggtactatagaggaaggtccttgacaggtatagttctgatcaaataaaagtctgttttgggttaaaaaaaaaaaaaaaaaaaaaaaa

SEQ ID NO: 1450 - DNA, 3077 bp, Rattus norvegicus
ggcacgaggcgggacgcggtgtgtggaggggacctcacaagttcttccaagtttgcagcatgatcccattgcttctgtccctgctggcagctctggtcctgacccaagcccctgcagccctcgctgatgacctgaaagaagacagctcagaggatcgagcctttcgggtgcgcatcggtgccgcgcagctgcggggtgtgctgggcggtgccctggccatcccatgccacgtccaccacctgaggccgccgcccagccgccgggccgcgccgggctttccccgagtcaaatggaccttcctgtccggggaccgggaggtggaggtgctggtggcgcgcgggctgcgcgtcaaggtaaacgaagcctatcggttccgcgtggcgctgcctgcctaccccgcatcgctcacagatgtgtctttagtattgagcgaactgcggcccaatgattccggggtctatcgctgcgaggtccagcacggtatcgacgacagcagtgatgctgtggaagtcaaggtcaaaggggtcgtcttcctctaccgagagggctctgcccgctatgctttctccttcgctggagcccaggaagcctgtgctcgcatcggagcccgaattgccacccctgagcagctgtatgctgcctacctcggcggctatgaacagtgtgatgctggctggctgtccgaccaaaccgtgaggtaccccatccagaacccacgagaagcctgttatggagacatggatggctaccctggagtgcggaattacggagtggtgggtcctgatgatctctacgatgtctactgttatgccgaagacctaaatggagaactgttcctaggtgcccctcccggcaagctgacgtgggaggaggctcgggactactgtctggaacgcggtgctcagatcgctagcacgggccagctatacgcggcatggaatggcggcttggacagatgtagccctggctggctggctgatggcagtgtgcggtaccccatcatcacgcccagccaacgctgtgggggaggcctgccaggagtcaagaccctcttcctctttcccaaccagactggcttccccagcaagcagaaccgcttcaatgtctactgcttccgagactctgcccatccctctgccttctctgaggcctccagcccagcctctgatggactagaggccattgtcacagtgacagagaagctggaggaactgcagttgcctcaggaagctgtggagagcgagtctcgtggggcgatctactccatccccatcacagaagatgggggaggaggaagctctaccccagaagacccagcagaggcccccaggactcctctagaatcagaaacccaatccgttgcaccacctaccgggtcctcagaagaggaaggcgaagccctggaggaagaagaaagattcaaagacacagagactccgaaggaagagaaggagcaggagaacctgtgggtgtggcccacggagctcagcagccctctccctactggcttggaaacagagcactcactctcccaggtgtccccaccagcccaggcagttctacagctgggtgcatcaccttctcccaggcctccaagggtccatggaccgcctgcagagactttgcaacccccaagggagggaagcctcacatctactccagatggggcaagagaagtagcgggggaaactgggagccctgagctctctggggttcctcgagaaagcgaggaggcaggaagctccagcttggaggatggcccttccctccttccagcgacatgggcccctgtgggtaccagggagctggagaccccctcagaagagaagtctggaagaactgttctgacaggcacatcagtgcaggcccagccagtgctgcccaccgacagtgccagccgaggtggagtggctgtggctccctcatcaggtgactgtatccccagcccctgccacaatggtgggacatgcttggaggagaaggagggtttccgctgcctctgtttgccaggctatgggggggacctgtgcgatgttggcctccacttctgcagcccgggctgggaggccttccagggtgcctgctacaagcacttttccacacgaaggagttgggaggaggcagaaagccagtgccgagcgctaggggctcatctgaccagcatctgcacccctgaggagcaggactttgtcaacgatcgatacagggagtaccagtggattgggctcaatgacaggaccatcgagggtgacttcctgtggtcagatggtgcccctctgctctatgaaaactggaaccctgggcagcctgacagctacttcctgtctggggagaactgtgtggtcatggtgtggcatgaccagggacagtggagtgatgtaccctgcaactaccacctatcctacacctgcaagatggggcttgtgtcatgtggacctccaccacagctgcccctggctcaaatatttggtcgccctcggctggcctacgcggtggacactgtgcttcgatatcggtgccgagacgggctggcccagcgcaacttgccgttgatccgctgccaggagaatgggctttgggaggcccctcagatttcttgcgtgccccgaagacctgcccgtgctctccgctcaatgaccgccccagaaggaccacggggacagctcccgaggcagaggaaagcactgttgacacctccctccagtctctagggaacaggcgtggaagactactgcccccaccagggccctctcacttcaactgcctgtgctcttccctatgatagggggttgacaagagaggggtgggactggaattcagaggacaagcgacccgaaggggtttctgggaaacacttgggtgactccgcccaacctagaccccgccccctcatacaagggcctcaggttttacccggtaagtccctaagtgcctcaactgccttctgctgtcagctgcctccttgtttctcgatttctttaggggacactgtgctactcgttcttaattttcaaagggtttttaggatggagtaccagcaaaaccaggtggaaataaagttgtttgaacctcgtgcc

SEQ ID NO: 1451 - DNA, 2402 bp, Rattus norvegicus
acgccggctgctggttgaactaggtacgggcctgtgggacgcagagctggggatccattgtgagtgcctagggagccacaaggtgcggtcctgttccttccggcatcctgaagatgaaagcggactgaattctatctgcagtcctggcgcaactgcagagctccggcaggttgagcgtgccaagagcctgcgaagtggagtgtcatctttgcttaccaggtccatgaggacctggccaacatggtgcccactggccaggtcggagaaaagcaagcctgtgaagagcccaggcaggaccgagaacttaagtcctggcgatggctcgtgttctacctctgcttctttggcttcatggcacagttgcgacctggggagagcttcatcacaccctacctcctggaacgtaacttcaccaaggagcaggtgaccaacgagatcattccgatgctgccctactcccacctggccgtgctggtccccatcttcctgctcaccgactacctacgatacaagccagtcctggtcctacagtgcctgagcttcgtgtgcgtgtggctgctgctgctcctggggacctccgtcgtgcacatgcagctcatggaagtcttctacagcatcaccatggcggcgcgcatcgcctactcctcctacatattctccctggtgcagccctcccgctaccagcgcatggccagctactcgcgggccgcagtcctactgggcgtcttcatcagctccgtgctgggccaggtgctggtcaccctaggaggcatctccacctatatgctcaactgtatctccctgggcttcatcctcttcagcctgagcctctccctcttcctaaagcgtcctaagcggagcctctttttcaaccggagcgcacttgtgcaaggagccttgccctgtgagctggatcagatgcacccgggacctggccgtccagagcccaggaaactggagcgcatgctgggcacttgcagggactccttcctggtacgcatgctaagcgaactggtgaagaacgtccggcaaccacagctgcgtctctggtgcctctggtgggtcttcaactcggcaggctactacctgatcacctactatgtccatgtcctgtggaaaatcactgacagcagactcaactacaacggtgccgtagatgccgcctccacacttctgagcgccatcacggccttcaccgcgggcttcgtgaacatccgctgggctctgtggtcaaagctggtcatcgcgagtgtcatagccatccaggctggcctggttttctgtatgttccagatcccggacatctgggtctgctatgtgaccttcgtgcttttccgtggggcctaccagttccttgtgcccattgccacttttcagattgcatcttccctgtctaaagagctctgtgcattggtcttcgggatcaacactttccttgccactgcgcttaagacctcgatcacactcgtggtctctgacaagcggggtctgggcctccaagtccatcaacagttccgcatctacttcatgtacttcctgacgctgtccatcatctgccttgcctgggctgggctggacggcttgaggtactaccggcgtggtcgccaccagccgctggcccaggcccaggctctgagtcccttggaggattctgtgcaggcgataagcctacaggatggagacctaaggagaccgcagccctcggcaccacagctgctcccagaggatggcagcgtagaagacggcagggcagacttgagagtcgaagccaaggcctgacctgtcttcaccttcctggcttcatcccagttcagccgccggattcctgactcagtggcagcccctcctgtgtgcactccagcctgaatcagcccttctggggtcccagtgcctgagacatgtgggggcccccctgttgcctttcaggagccttcaggttaggccacagaactctctccttaggggccaccttttttaacagtggggcgacagacagcttgtccttccggtagcctctgaggaccctaagcccagcctacttcatgctttagcaatggctggagcctgctacagacactcaggaccgctccctggcttttgtgaaccacaatgtcaggccactacgagcctgggttgcctactgcttgccaagaagaacctgtgtaggggtcagctgtgcccaccaggctggtctgccctttgctctgggatgctcaggacaaatcacgtctgcccccagggctagtgaggtagcccagacaccggacaaggtccgctgagcctgcagggtactggttacctgtcctaggctcctggtgaagctgccatacctccactctcggaggtgcttgtttgtatggttgtctgattttttaaaacttgacattaaaatggagaactac

SEQ ID NO: 1452 - DNA, 1470 bp, Rattus norvegicus
gcggctacggcgtgcggggagctgaggtaaagccggggctagtacggtaccaggcggtgcacgagctggctaagccagatttgtaaaaatggagtttcaagccgtagttatggccgtcggtgggggatctcggatgacagacttgacttccagcattcccaagcctctgcttccagttggaaacaaacctttaatttggtacccgctgaacctgcttgagcgagttggatttgaagaagtcatcgtggttacaaccaaagatgtccaaaaggctctgtgtgcagagttcaagatgaaattgaagccagatattgtgtgcattcctgatgaggcagacatggggactgcagattctctacgccacatatatccaaaacttaagactgatgtgctggtcctgggctgcgatctgataacagatgttgccttacacgaggttgtggacctgttcagagcttacgatgcatcacttgccatgttaatgaggaaaggacaagagagcacagaaccagttccaggtcagaaggggaaaaaaaaaacagtggagcagcgtgacttcattggagtggacagcacaggaaaaaggctgctctttatggctaatgaagcagacttggatgaagagctggtcattaagggatccatcctgcagaagcaccctaggatacatttccagacaggccttgtggatgctcatctctactgcttgaagaaatatgttgtggatttcttaatggaaaataagtcaatcacttctatccgaagcgaactgattccgtacctagtaagaaaacagttttcctcagcctcctcacagcaaaggcaggaagacaaagaagaggatctaaagaaaaaggagcccaagtctttagatatttacagttttataaaaaaagacaacactctgactttggctccctatgatgcctgctggaatgcttttcgaagagacaagtgggaagatttgtctagatcacaggttcgctgctatgtccacatcatgaaggaaggactttgctctcgagtaagcacactgggactctacatggaagccaacagacaggtacccaaattgctgtctgttctttgtcctgaggaatcaatgatccatccatcagcccagattgccaacaaacacctgattggagccgacagccttatcgggtcagatacacaagttggagagaagtcatctattaagcgatctgtcattggctcatcctgtgtcatcagagacagagtaactgttaccaactgccttctcatgaactctgtcaccgtgggagaagggagcagcatccatggcagcgtcatcttcaacaacgccgtggtcgaggcgggcgcggagatcagggactgtttaattggaagtggtcagaggattgaagccaaagctaaacgcatgaacgaggtgatcgtgggaaatgaccagctcatggagatctgaatcctgaacaagtctgaccccac

SEQ ID NO: 1453 - DNA, 347 bp, Rattus norvegicus
cagacccgcaactttctggtccgggcttcttgccgccttcgtttggagcctagcaaagagtacttaatcatggggatggacggagtcaccagtgacctcaagggagacccccagtacttgctggactcaaacagttggatcgaggagatgccatctgagcacctgtgcaggagcacccgtcagcgggcagcctgtaccagctcaatgacttcctgcaggagtacagaagccaggggtgccaggtgtgagggcgtcggactctggatccctgagctcagccccagggtcagggcctctcacgaagcagggcctgcttaacagggtaaataaataaaacttttgacagt

SEQ ID NO: 1454 - DNA, 2461 bp, Rattus norvegicus
ccgggacatacgctcactcgcggttccattgtagagtgaccggctgccacccggctggccatgaggggtacgcccctgctcctcgtctctctgttctctctgcttcaggacggggactgccgcctggccaacgcagaggagaagctgatggatgacctcctgaacaaaacccggtacaacaacctgatccgcccagccaccagctcctctcagctcatctccatccgcctggagctatcactgtcccagctcatcagtgtgaatgagcgagaacagatcatgaccaccagcatctggctgaaacaggaatggactgactaccgcctggcctggaacagctcctgctatgaaggggtgaacattctgaggatccccgcaaagcgtgtctggttgcctgacatcgtgttgtacaacaatgccgatggcacctatgaggtgtctgtctacaccaacgtgattgtgcgttccaacggcagcatccagtggctgccccctgctatctacaagagtgcctgcaagattgaggtgaagcactttcccttcgaccagcagaactgcaccctcaaattccgctcctggacctatgaccacacggagattgacatggttcttaagtcgcccacggccatcatggatgacttcacccccagtggtgaatgggacattgtggccctcccaggacggaggacggtgaaccctcaggaccccagctacgtggatgtgacctatgacttcatcatcaagcgcaagccgctcttctacaccatcaatcttatcattccttgtgtgctcatcacctcgctggctatcctggtcttctacctgccctccgactgtggggagaagatgacgctctgcatctctgtgctgctggcactcacgttcttcctgctgctcatctccaagatcgtgcctcccacctcccttgacataccgctcattggcaagtacctcttgttcaccatggtgctggtcaccttttccatcgtcaccactgtgtgtgtcctcaatgtgcaccaccgctcacccagcactcacaccatggcatcctgggtcaaggagtgcttcctgcacaaactgcccaccttcctcttcatgaagcgtcccggtcttgaagtcagcctggtcagggtccctcatcccagccagctgcacttggccacagctgatactgcagccacctctgccttaggccccaccagcccatccaacctctatgggagttccatgtactttgtgaaccctgtccctgccgctcctaagtctgcagtcagctcccacacagcaggcctccccagggatgcccgtctgaggtcctccgggaggttccgggaagatctacaggaagcattagagggtgtcagcttcatcgcccagcatctggagagcgatgaccgagatcaaagtgtcatcgaggactggaagttcgtcgcgatggttgttgaccgcctgttcctgtgggtgttcgtgtttgtgtgtattctgggcaccatggggctcttcctgccaccccttttccagatccacgcaccctccaaggactcctaggctacccggcgtgcctcgggcccgggttgtagtgagatgatatgagaagccgtgtgggaagctgggcgtgtcttggcccgggttgtagtgagatgatatgagaagccgtgtgggaagctgggcgtgtctcgggcccccgggttgtagtgagatgatatgagaagccgtgtgggaagctgactgttccatttgggccatagctaatgaagccctaagtaaagccgtgactattggcaatcagcccatcaaactagccacagccacgagaaggacagagatagatgccttctgctgatccctctgatgccgtccagtaagtccctgaaggaggaggatgaggctgctgaataccagcctggcctccttccttccacgtgccaggcaccggagtcagacagccgtgtatcatgccgtcacaccccagcccgccttcccacccatctccctctgattcgcagctacccactagattcccccaccatctttcatttccatacacttctagattctcccaagtcagaacctttatatcttctactgctaccgtccaaacctcactgtaaactcccaagcttttcacgtggctgcaccagtcagagctctgctccaatgccacttccttgtataagccttcccatgatcctctgctccagtgtcatttccttgtataagccttccctagtcatgcattgcaaagcagtgtctcccataaccacatcaaatctccagcttccttgagtgttccccgtcagtagctgcagcctttagttggtggcacactagtcaccagcaccttgcccataaaagtgtatgctccataagggctgggtgtgtggattcacattcactccagagcttgggacccagctctgcacacagaaggtgcaaaataaatgtttattgaatgaaaaaa

SEQ ID NO: 1455 - DNA, 847 bp, Rattus norvegicus
acgagctagacctccctagctccgcccgccgcgtgctcccgcctcccactcggaatgcctgtctggggcggtggaaataagtgcggggcctgcgggagaaccgtgtaccacgctgaagaggtgcagtgtgatgggcggacgttccaccgctgctgctttctgtgcatggtttgcaggaaaaatttagacagcacaacagtggcaattcatgatgaagagatctactgcaaatcatgctacggaaagaagtatggaccaaaaggctatggttatggccagggcgctggcacgctcaacatggaccgtggtgagaggctgggcatcaagccagagagtgctcaacctcacaggcctacaacaaatccaaacacttctaaatttgcccagaaatatggaggtgctgagaagtgctccagatgtggggattctgtgtatgctgctgagaagatcattggagctggaaagccctggcacaaaaactgtttccgatgtgccaagtgtgggaagagtctggagtctacaactctgactgagaaggaaggtgaaatctactgtaaagggtgctacgcaaagaactttgggcccaagggattcggctatggtcaaggagcaggggcccttgttcatgctcagtagtggtgtaaacccagtaagcatggcaaagaacctccattaatgtggatggccttaccgcactcaggctgtgcatcggccagcactcagcactgtgtagcacacacgctatgtgcacaatcgggctggacaggaagcactacactctcctgcccatccgctaacgtttaagaacgttcttttacatttggaataaaattttggtttgatttga

SEQ ID NO: 1456 - DNA, 5180 bp, Rattus norvegicus
gaattccgcacccggggcgggacaagaggtctgctttccaaagagaaggcttcgcgtctgtctgcagcaggcgacagtcccgggcgccacctgcgcttcgggcgcgggccaggctggtgcgcgccgggcccccagcgcccgctactgagagcgtgaagtgaccgaccgtgagtcctccggcttgcgtccccttccagcaccagggactcacgccccaattactgcttgctcaagggtggacgagctccggccgagccgctgccccgccccgtactacctggcagctgcccgggtgcagcgcacagcgccccgcgcggccccagcagagcccctgccctcccacctgcgccgcgcgcccgccgctccgtgctcccgagacaggagacgcggccccgctcccgctcgcgcccgcgcactcggcgcagcgcgcgcgcccgccgctccgcccgccccccgcgctctccccgccccctccctcccccgcaggcacgagcgaatgtagcccgcgagagaaaatggcggcggcggcgggcgatcgcgcctcgtcgtcgggattcccgggcgccgcggcggcgagccccgaggcgggcggcggcggcggagctctccagggaagcggcgcgcccgcagcgggcgcggggctgctgcgggagactggcagcgcgggccgcgagcgcgcggactggcggcggcagcagctgcgcaaagtaaggagtgtggagctggaccagctgccggagcagccgctcttcctcaccgcctcgccgccctgcccatctacttccccgtcgccggagcccgcggacgcggctgcaggagcgagtggcttccagcctgcggcgggaccgccacccccgggagcagcgagtcgctgcggctcccactctgccgagctggcggccgcgcgggacagcggcgcccggagccccgcgggggccgagccgccctctgcagcggccccctccggtcgagagatggagaataaagaaaccctcaaaggattgcacaagatggatgaccgcccagaggagcgaatgatcagggagaagctcaaggcgacctgtatgcctgcctggaagcacgagtggttagaaaggaggaacaggagaggccctgtggtggtgaaaccaatccctattaaaggagatggatctgaaatgagtaacttggcagctgagctccaaggagagggccaggcaggctctgctgcaccagctcccaagggccgacgaagcccgtctcctggaagctccccatcagggcgctcagggaagccggaatccccaggagtgagacggaaacgagtgtccccagtgcctttccagagtggcagaatcacaccacctcgaagagccccgtcgccagatggcttctcaccgtacagcccagaggagacgagccgccgtgtgaacaaagtgatgagggccaggctgtacctcctgcagcagataggacccaactctttcctgattggaggagacagtccagacaataaataccgcgtgtttattgggccacagaactgcagctgtgggcgtgggacattctgcattcacctcttgtttgtcatgctccgggtgttccagctagaaccctccgaccccatgctatggagaaaaactttaaaaaattttgaggttgagagtttgttccagaaataccacagtaggcgtagctcaagaatcaaagctccatctcggaacaccatccagaagtttgtctcacgcatgtcaaactgtcacacattgtcatcgtctagcacatccacatctagttcagaaaacagcatcaaggatgaagaggagcagatgtgtcccatctgcttgttgggcatgctggatgaggagagcctgactgtgtgtgaagacggctgcaggaacaagctgcaccaccactgcatgtcaatctgggcagaagaatgtagaagaaatagagaaccgttaatatgtcccctttgtagatctaagtggagatcccatgacttctacagccatgagttatcaagccctgtggattcccctacctccctgcgaggtgtacagcagccctcctccccgcaacagcctgtggccggatcacagcggaggaatcaggaaagcaattttaaccttactcattatggaacccagcagattcctcccgcttacaaagatttagccgagccatggattcaggcattcggaatggagctcgttggctgcttattctctagaaactggaacgtaagggagatggcccttaggcgcctttcccacgatgttagcggggccctgttgttggcgaacggggagagcactggaacttctggaggcggcagcggaggcagcctaagtgctggcgccgccagtgggtcttcccagcccagcatctcaggggacgtggtggaggcgttctgcagcgtcctgtctatcgtgtgcgctgaccctgtctacaaagtgtacgttgctgctttaaaaacactgagagccatgctggtatacactccttgccacagcctggcagaaagaatcaaacttcagagacttctccggccagtggtagacaccatcctagtgaagtgcgcagacgccaatagccgcacgagtcagctgtccatatcaacactgttggagctctgcaagggccaagcgggggagttggcagttggacgagaaatacttaaagctggatccatcggtgttggtggcgttgattacgtcttaagttgtattcttggaaaccaagctgaatcaaacaactggcaagaactcctgggtcgcctctgtcttatagacagattgctcttggaaatttctgcggaattttatcctcatattgtcagtaccgatgtctcacaagccgagcctgttgaaatcaggtataagaagctgctgtccctcttagcctttgccttgcaatccattgacaattcccactctatggtcggcaaactctcgcggaggatttatctgagctcagcacgaatggtgaccacagtgccccccctgttttccaagctggtaaccatgctaagtgcttctggatcctcccacttcgccaggatgcgccggcgtctgatggccattgcagacgaggtagaaattgccgaggtcatccagctgggttcggaagacactttggatggccagcaggacagctcgcaggcattggcccctccccgctatccagagagcagctcccttgagcacacagcccatgtagagaaaactggaaaaggattaaaagctacgagactgagtgccagctcagaggacatttctgacagactggctggcgtttctgtaggacttcctagttcagcaacaacagaacaaccaaagccaacagttcaaacaaaaggcagaccccacagtcagtgtttgaactcctctcctttgtctcctcctcagttaatgtttccagcaatatcagccccatgttcatctgccccgtctgtcccagctggctctgtaacagatgcttctaagcatagacctcgggcgtttgttccctgtaaaataccctctgcgtctccccaaacacagcgcaagttttccctacagttccagaggacctgctctgagaaccgagactcagaaaaactctccccagtctttactcagtcgagacccccaccctccagtaacatacacagggcaaaggcatcccgacccgttccgggtagcacaagcaaactaggggatgcctcaaaaaacagcatgacactcgacctgaacagtgcttcccagtgtgatgacagctttggcagtggcagcaacagtggcagcgccgtcatacccagtgaggagacggcattcaccccagcagaggacaagtgcaggttagatgtcaaccccgagctcaactccagtatcgaggaccttcttgaagcatctatgccttcaagtgacacaacagtcactttcaagtccgaagtcgccgtcctctctcctgagaaggccgaaagtgatgacacctacaaagatgacgtcaatcacaatcaaaagtgcaaagagaagatggaggctgaggaagaggaggcgctcgcgattgccatggcaatgtcggcttctcaggacgccctccccatagtccctcagctgcaggtggaaaatggagaggatatcatcatcatccagcaggatacaccagaaaccctaccagggcataccaaagcgaacgagccctacagagaagacaccgagtggctgaaagggcagcagataggcctcggagcattttcttcttgttaccaagcacaggatgtgggcactggaactttaatggctgtgaaacaggtgacctacgtcagaaacacatcttctgagcaggaggaagtggtggaagccttgagggaagagatcaggatgatgagccacctcaaccatccgaacatcatcaggatgctgggggccacgtgcgagaagagcaactacaacctcttcatcgagtggatggcgggagcctccgtggctcacctcttgagtaaatatggagctttcaaggagtcagtggtcattaactacacagagcagttactccgtggcctttcctatctccacgagaaccagatcattcacagagacgtcaaaggggccaatctgctcattgacagcaccggtcagcggctgagaattgcagacttcggtgctgccgccaggttggcatccaaaggaactggtgcaggagagttccagggacagttactggggacaattgcattcatggcgcctgaggtactaagaggtcagcagtacggtaggagctgtgacgtctggagtgttggctgcgccattatagaaatggcctgtgcaaaaccaccctggaacgcagaaaagcactccaatcatcttgctttgatatttaagattgcgagtgcaactactgcaccatccatcccgtcacacctgtccccgggcctgcgagacgtggctctgcgctgtttagaacttcaacctcaggacagacctccgtcaagagagctactgaagcatcctgtcttccgtacaacatggtagtcaactgctcagggtgcgcaacaaggaaagaaaactcgcgggcagccacgttgatagtctgctggcctcataccactgaccagaagaggggccagtggggagcccgcacctaagcatgtgactgacaaatcatgactgcacctgagctccgtctgcagacggctacaactcgtgcaggagctg

SEQ ID NO: 1457 - DNA, 1703 bp, Rattus norvegicus
ggcacgagtctccacgcaccggagcatccagagagtcgccgcgcgccgacggagcggacatgggcagagcgatggtggtcaggctagggctggggttgctgcttctggcactgctcctacccacgcagatttattgcaaccaaacatcggttgcaccattttccgggaaccagagtatctctgctgccccaaatccaactaatgctaccaccagatctgggtgtagctccctgcagtccacagccggtctcctggccctctctctctctctcctacatctctactgttagagactcaggccaagaaacgtctctacttccccatctagacccaccccgaatggcaaccacaagtccaatgtgagtgaccaggaagagacaggtccacatcaaatcggctgttaccattacctcaacagaaaacactgagaatccgaaattcgactggcttaaaggacgcgtgaagggtttgagagctgagagatgccaatatgggatctgctggagttttatgtccgagatgaagacaagcatccaaaattgacgtgatttgctcgaaatgtggcttaagaaatgtggacacttaaaactctcactcgaaatcgggcgtaggtttgatgtagagggagaaggatggggtgtggaatggaggtccattattttcattggttccttcgacctataaggccataatgcagttaggtggtattcaaaagcttctctgatgctatttctgtgtatgttggaaggaactaccaggtgttattttaaatccccgatgtgttgttttgttactactaatttaataggctaaactctaggtgaagtcccacgtcgttgacctctagttcttctctccggaacagaacgttttacaccctccttctgtggctttaggtcacccacccccaaatccagccacccctgagtaaatctgatttcaaaagtcacaacggcaaagcatttcccagtgtcttttctcactcaccacgggtactaagttcacttaggtgagctggttctccagagagcagaattctgttgatctcggctaatctccaaacgctgcgttttattttggcatatgtcgagggcttttcatgatttaaagcgtggtctgttagcaaggccaaaattatgagtcttgaaattctacaggcaaatatgcaacccagcatttgggatgtgaggactggaagctctcacagaattacacaaagtcttttatacaatttctgtaaatacttttttttttttaaagagaaaaacaaaaccatggatcggaataaccacgtttggaatactttggttatcagttcatatttttagatagtttgacattggtcctgtgcctgagagggggtttggttctacagtaagtttttttttcccccaatttccttgatacacacataccttctaaaacacagacatttcctcaaaaaaaaaaaaaaattccttttgttcgcatggtcacacactgatgcttgccattctgggatctaatacggtcacagtagtcttgataaccagaatcatttttttctccgtctttagaaacctacccgggaacaaggagacctcacagacccgaagctactgtgtgtgtgaatgaacactccccttgcctcatacccgaatgctgtacatctatttgattgtatattgtgtttgtgtattgtaaataaaagaaagaaatggctg

SEQ ID NO: 1458 - DNA, 4566 bp, Rattus norvegicus
ccagcttgcgtccatggccaccgctgcgaccgaggagcctttccctttccatggtcttctaccaaagaaagagactggggcctcctccttcctgtgccgctacccggagtatgacggacgcggggtgctcatcgccgtcctggacacaggggttgatcccggggccccgggcatgcaggtcacgactgatgggaaaccaaaaatcattgatatcattgatacaacaggaagtggtgatgtgaatactgctacagaagtagaaccaaaagatggcgaaatcactggtctttctggaagagtgcttaagattcctgcaaactggacaaatccttcaggaaaatatcatattggcattaaaaatggttatgacttctatccaaaggctctcaaggaaaggatacagaaagaacggaaggaaaaaatctgggatccaattcacagagttgcgcttgcagaagcttgtagaaaacaagaagaatttgatattgccaataatggctcttcccaagccaataaactaatcaaggaagagttgcagagtcaagtggaattacttaattcttttgagaaaaagtatagtgatccaggccctgtgtatgactgcttggtgtggcatgatggtgagacctggagagcctgtgttgattcgaatgaaaatggggacttgggtaaatctactgtattgagaaactacaaagaggctcaagaatatggttcttttggcacagctgagatgctgaattactctgttaatatttatgatgatggaaacctgctctccattgtgaccagtggaggagctcatggaacccatgtagcgagtatagctgctgggcattttccagaagagcctgaacggaatggagttgctcctggtgctcaaattctatccattaagattggtgatacaaggctaagcaccatggaaacaggcacaggcctcatcagagctatgatagaagttataaatcataagtgtgatcttgtcaactacagttatggagaagcaactcattggccaaattctgggagaatttgtgaagtaattaatgaagcagtatggaaacataatacaatttatgtttcaagtgctggaaataatggtccatgcctttctacagtgggttgtccaggaggaactacttccagcgtgataggtgttggagcttatgtttctcctgatatgatggttgcagagtattcactgagagagaaactacctgcaaatcaatatacatggtcttctagaggcccaagtgctgatggggcccttggtgtgagcatcagtgcaccaggaggtgctattgcttctgtgcctaactggacattgagggggactcagctaatgaatgggacatcaatgtcttcccccaatgcctgtggtggcattgccctggtactttcagggctgaaagcaaataatgttgactatactgttcactcagtcagaagagctctagaaaacactgcaataaaagctgacaatatagaagtatttgcccaaggacatggaattattcaggttgacaaagcttatgactacctcattcagaatacatcatttgctaacagattaggttttacagttacagttggaaataaccgtggcatctacctccgagatcctgttcaggtggctgctccttcagatcatggtgttggcattgagcctgtatttccagagaacacagaaaactctgaaaaaatatccttccagcttcatttagctttaacttcaaattcatcttgggttcaatgtcccagccatttggaactcatgaatcaatgtcggcacataaacatacgtgtggaccccaggggcttaagagaagggttacattatacagaggtatgtgggtatgatatagcatcccccaatgcaggtcctttattcagagttccaatcactgcagttatagcagcaaaagtaaatgaatcatcacattatgatctagcctttacagatgtacattttaaacctggtcagattcgaagacattttgttgaggttcctgagggggcaacttgggctgaagttaccgtgtgttcgtgttcttctgaggtatcagcaaaatttgttcttcatgcagtacagcttgtgaagcagagagcatatcgaagtcatgaattttataagttttgttcccttccagaaaaaggaacactcattgaagcctttcctgttctgggtgggaaagcaattgaattttgtattgctcgttggtgggcaagtctcagtgatgtcaatattgattataccatatcattccatggcatagtgtgtactgcaccacagttaaacattcatgcatctgaaggaatcaatcgttttgatgtccagtcctctttaaaatatgaagatctggctccttgcataactttgaagagctgggtgcaaacactacgcccagtaaatgcaaaaaccagacctttaggatcaagagatgttttgccaaataatcgccagctttatgagatggtcctgacatacagctttcatcagcccaagagcggagaagtaacacctagttgtccactcctttgtgaattattatatgagtcagaatttgacagtcagttgtggattatttttgaccagaacaaaagacagatgggctcaggcgatgcctatccacatcagtattctttgaaattggagaaaggagattatacgattcgattacagattcgtcatgagcaaatcagtgatttggatcgtctcaaagatcttccgtttattgtttcgcataggttgtctaataccttgagcttagatattcatgaaaatcatagccttgcacttctaggaaagaagaaatcaagcagtttgacattaccacccaaatataatcagccattctttgttacttccttacctgatgataaaatacctaagggggcaggacccggatgctaccttgcaggctccttgacattgtcaaagactgagcttggaaagaaagctgatgtgatccctgttcattactatctaatacctccaccaacaaagactaagaatggcagcaaagataaagaaaaggattcagaaaaagagaaagatttgaaagaagagtttactgaagctttacgagatcttaaaattcagtggatgaccaagctggattctactgacatttacaatgaattgaaagaaacatatcctgcttaccttcctttgtatgttgcacgtcttcatcaattagatgctgaaaaggagcggatgaaaagacttaatgaaattgttgatgctgccaatgctgttatttctcacatcgatcagaccgctctcgctgtttacattgccatgaagactgaccccaggcctgatgcagctactataaaaaatgatatggacaagcagaaatctaccctggtagatgccctctgcaggaaaggatgtgctctggcagaccaccttcttcatgcacagccccacgatggggcagcagctggagatgcagaagcaaaagaagaggaaggagaaagtaccttggaatctctatcagaaacctattgggaaactacaaagtggacagatctttttgacactaaggttttgacatttgcatacaagcatgcattagtaaataagatgtacgggagaggccttaagtttgcaaccaaactcgtagaagaaaaaccaacaaaagaaaactggaaaaattgtattcaactgatgaaattactcggatggacccattgtgcgtcttttactgaaaactggctccccatcatgtatcctcctgattattgtgtattctaaaatgggaaccaaaacgttaaatttcgaaagcagaaaattttatagtgaacaaatatatgaacaaatgtgtggcatttctagtctaactaatgcatgtcttcatccactatcgaatactgatcattaaaactctatgtatttatcagagaactcaatggtgtgtggcttcatacatgtaatgtagacagacctctgacatcatgctgctttcctgctgcctcccacacttggctagggagggcagagcctgcctgccagccccaacctgggtggatgcagctgctcactgcaggagaggttttcatctcttaatttttaactgtaaaacgtcatccagtttttattttataaatcaaaaaggttaaaacatgctaaatttttccaattatatagaggccttaaaaatgctacattgggtgtagctaaattatttatttgactaaaaattacgagaacataatttccagacttctaaaaataaattcaattaatgggtatggtggggaggtataaatacatggcaactgggaaaagaaacgtgttaatgtaatcttcactccggagtcacaacaagcaagttgtttttacagcatcctcaagtacacagcatcagaataagttaaaatttcatgtgttggtgccagacagttgaatctatctggttttgtaaagatatacacagtatgtttataacattgaaatcatgtaaaatacatgaataaatgtgcaaaacaacaggcacagcacaccatatgcactctgatacctgttttttataaataaaagtaaatattgaagctaaa

SEQ ID NO: 1459 - DNA, 3273 bp, Rattus norvegicus
gaattcggcacgagcttatctggcctccttgagtgttcccggcttctgtcctttgatcccctggcgtccccaactcccatccggtgaccgattcttctccgttgccgccctcagtttccctaacttcctaaatcaacccatcccccaatcattgcccgactttcaccctggacggtccactgtccccagctcctccctctgcgcttctgagtggccctgattttctgcctcattgcccgatttcccccccaacaccacctgtttcctgcgtccctccctttatgcccaccccccaacgcccatttctaactctctgcttatcttgtgcctccgcgtttcttctgctcccacgtgttttctagcgtccagtcctgggttcacctctagctcccacagatgacctggaagctggtggcagggagctgtgacccagagcacaggggcaggctgggtcgcctacctgtcccacataggatgcagttctttggacgcctcgttaacaccctcagtagtgtcaccaacttgttctcaaacccattccgggcaaaggaggtgtccttggctgactatgcctcaagtgaacgtgttcgagaggaagggcagctgatcctgttgcagaatgcttccaatcgtacctgggactgtgatctggtcagccctaggaacccacagagtgacttccgactcttccaactggagtcagaggcagacgtcctggtgaacttccagcagtattcctcccagctgccaccgttctatgagagctctgagcaggtcctgcatgtggaggtgctgcagctgacggacctcattcggaaccaccccagctggacagtgacgcacctggccgtggaacttggcattcgggagtgtttccatcacagccgcatcatcacgtgcgccaacagcacagagaatgaggagggctgtaccccactacatctggcctgccgcaagggtgacagtgagattctggtggagttggtacagtactgccacgcccagatggatgtcactgacaacaaaggagagaccgccttccattacgctgtgcaaggggacaatccccaggtgctacagctcctaggaaagaatgcctcagccggcctgaaccaggtgaacaaccaagggctgacgccgctgcacctggcctgccagatggggaagcaggagatggtgcgtgtcctgctgctctgcaatgcccgctgcaacatcatggggcccggtggcttccccatccacacagccatgaagttttcccagaaggggtgtgctgaaatgattatcagcatggacagtaaccagatccacagcaaggatcctcgctatggagccagcccgctccactgggccaagaacgctgagatggcccgaatgcttctgaagaggggctgtgacgtggacagcacaagtgcctcggggaacacagccctgcacgtggctgtgacgcgcaaccggtttgactgtgtcatggtgctgctgacctatggggccaacgcaggtgcccgaggagagcatgggaacacaccactgcatctggccatgtcgaaagataacatggagatggtcaaagccctcattgtatttggggcagaagtagacaccccgaatgactttggggagactcctgcattcatagcttccaagatcagcaagcagcttcaggacctcatgcccgtctcccgagcccggaagccagcgttcatcctgagctccatgagggatgagaagcgaacgcatgaccacctgctctgcttggacggagggggcgtgaagggcctggtcatcatccagcttctcattgccattgagaaggcctcaggtgtggctaccaaggacctcttcgactgggtggcaggaaccagcacaggcggcatcctggccctggccattctacacagtaaatccatggcctatatgcgtggcgtgtacttccgtatgaaggatgaggtgtttcggggctcacggccctatgagtctgggcccctggaggagttcctgaagcgtgagtttggggagcacaccaagatgacagatgtcaagaaacccaaggtgatgctgacagggacactgtcagaccggcagccagcagagctccacctcttccggaattacgatgccccagaggccgttcgggaacctcgctgtaccccaaacattaacctgaagccgcccacccagcctgcagaccagttagtatggcgggcagcccggagcagtggggcagccccaacctatttccggcccaatggacgcttcttggatggtgggctgctggccaacaaccccacactggatgccatgactgaaatccatgagtacaatcaggatatgatccgcaagggccagggcaacaaggtgaagaaactctccatagtcgtgtctctgggtacaggaaagtcccctcaagtgcctgtaacctgtgtagatgtctttcgtcccagcaacccttgggaactggccaagactgtttttggagccaaggaactgggcaagatggtggtggactgttgcacagatccagatgggcgggctgtggatcgtgcccgggcctggtgtgagatggtcggtatccagtacttcaggctgaacccccagctaggctcagacatcatgctggacgaggtcagtgatgcagtgctggtcaacgccctctgggagaccgaggtctacatctatgagtaccgggaggagttccagaagcttgtccagctgctgctatctccctgagcccggcctgctggcaggagtggccggcgtggcacactgcggccaggctggcctgccgctccatgtccatctgagactagggctcggagcgggcagttccccatgaggtacctctcctgatccatccgcactttactaatccagctgaaagcccagagttccctcggccccttcccctgactatgaaggacaactgattccatctactacccatatatcagagatcaacactaagggccagtgtcgagagggccctcccaggctccctggccactgctgcccaccccctctcccacttcctgatgtcagggattagagaaatgttccaccccgtcatcaggtgaaatccaggctaatgaaacccagcgccattctgccattcgactttgcccctcgcacctgcagcctctccaccctgcagccgccccacaaggagcgctcctagctcccaaaggtcaatcctgtgcacatgctcttctctggaaggagagtggggagggctcaaggccacctcaactgtgaaataaacggttttacactcaa

SEQ ID NO: 1460 - DNA, 2006 bp, Rattus norvegicus
gcgcgcgcggccagcgagacctcccggctccactggcggcgcgggcggcggtaaaatgtcggctccaggaccttaccaagcagctgcaggcccttctgtaatgcctactgcacccccaacctatgaagaaacagtgggtgtcaacagttactacccaacgcccccagcacctcagccgggaccagccacagggctcattacgggcccggatgggaagggcatgaatccaccttcgtactacacccagcccgtgcctgtccccaacgccaacgcaattgcagtgcagacggtttatgtgcagcagcccatctccttctacgaccgccccatccagatgtgctgtccttcctgcaacaagatgatcgtgacccagttgtcctacaatgcaggagccctcacctggctctcctgtggcagtctgtgtctgctgggatgcgtcgctggctgctgcttcattccgttttgcgtggacgccctgcaggatgtggaccattactgccccaactgcaaagcgctcctgggcacctacaaacgtttgtaggactcggccagccacaggggaggtagacaagtgctcccggaagtcacccaacccttgcccagcgcagccagaagacgtcccttccttgatctcttcatgagctcgtcttcgtgtcttttagggggtggggaaagtcggaaaagtaacaaacccccaaacccagaaactgctgctggagttgtgccctgcacatgcaaagacgtggaccttgggtgttgctttaagggtttaccgcctgatctcgttaccccactaactgtgattgttactccatttgcatctcgtctgctgatttgccactgcctgccccctcttcctcaagaagaggccttcctggtgccaggctcaaaacccgaagctacagtttgccttatttttcactgtttggcttgatctgtaccatctctcccagccctaatgacagagaccttgccttaaagactttgcggttctgtaattgcagacttctccagcactcagaatcactttcaattccatagagttgttcctctccacacacacccctcccccggtgcacagaagggctgccgacacccaccagactcatacagagaaggtcacaagtactaaatgaaaggctcccagcccaccttgtctcagcccctgtcctgtgaagggactccttcctcacacagtttctgtgacttccttttgttcttaaacacatggaagttacttggcagggagacatttctagaataatttttgtgatcacgatacacccttcattctccgtttgctggtatgtttttagttggtttggttttagttttccacatacagtctagctcgtggccagccttgagctccgaggagatcctccatcttctcctctcaaatacccagggcccagacatttgcctctgcacctgctgggctttttctctcatttttccttaaccagaaaaacaaacgggtaatttcatcgactgcctatgtaggtttggtgtggttttgaaaaccttgtttccatggggccctttgggggagtcagggggcccctgcacgagcccatgcttcaatgccgagagattggctgctggaaccccctgaagcatgatttcatgttttagagatgagcttctgtggtacggtcatcatggtctccaacatcaacagacaaggtagaaggatgtcaacgacaaagataagttcagggctctttctagggtcaccactctgtcctgtgtaacactgacacagtctggccagcctttcaggaggtcctggctccctcctaaacccatgtaggwcttgctgcaagtaacagtgtatgaagtcaacctgacctggaacagaagtctgcatattggttaagatacagcctatgtatcttcatacaacgatccagaagtactagacatcatttttgcagtgaattatgggtaccatacatgactttgatgatatctgcttttaaacaaataaaatctttgatcactca

SEQ ID NO: 1461 - DNA, 661 bp, Rattus norvegicus
atgtacaccttcgtggtgcgccaggagaatagcagcgtctacgccgaggtctcccggctgctgctggccaccggctactggaagaggctgcggcgggacaaccccaggttcaacctgatgctgggcggaaggaaccgactgcctttcgggagactaggacacgaacctgggctggcacagctggtgaactactacaggggggccgacaaactgtgccgcaaagcttccttagtgaagctagtcaagaccagtccggaactgtctgagtcctgctcatggttccccgagtcctatgtgattcatccaactaacctcaagacgccagtcgctccagcgcagaatggcatccagcttccggtcagtaactccaggacagatgagagagaattcttcttggcttcttataacagaaagaaagaggacggggaaggcaacgtttggattgcaaagtcatcagctggtgccaaaggcgaaggcatcctcatctcctcagaggcgtcagagcttctggattttatagacaaccagggccaagtgcacgtgatccagaaatacctcgagcaccctctgctcctcgagcccggtcaccgcaagtttgacattcgaagctgggtcctggttgaccaccagtataacatctacctctacagagaaggtgtgc

SEQ ID NO: 1462 - DNA, 1092 bp, Rattus norvegicus
aggggaagtcccgagacaaaggagcgccgccgcctctgccgccgcgacggtccgggccgcggtcgcccagggactttgaatatgtcggggattgccctcagccgacttgcgcaggagaggaaagcctggaggaaggaccacccttttggctttgtggctgtcccaacaaagaaccctgatggcacgatgaacctgatgaactgggagtgtgctatccctggaaagaaggggactccgtgggaaggaggcttgttcaagctacggatgcttttcaaagatgactatccgtcctcaccaccaaaatgtaaatttgagccaccactgtttcatccaaacgtgtatccttctggcacagtgtgcctgtccatcctggaggaagacaaggactggcggccagctattacgatcaaacagatcttattaggaatacaagaacttctaaatgaaccaaatattcaagacccagctcaagcagaggcctatacaatttactgccaaaacagagtggaatatgagaaaagggttcgagcacaagcgaagaagtttgccccctcataagcagcggcccgggctccatgacgaggaagggattggcttggcaagaacttgtttacaaccttttgcagatctaagtcgctccgtacagttactagtagcctgggagggttgagcgggcgccattttccatttccgccactggcatattcagtcttttgtatttttgattattgagtaaaacttgcttttattttaatattgatgtcagtatttcaactgctgtaaaatgataaacttttgtacttggtaagccctaggagctagtttcttctcgtccgctcggatcgaggcatgttccccactgttcagagctctggcctccagctggctgtatgacagaaccacactgtccctccttccttccctaccctcgtccttctcagaaacctgggctgttgcttatgagcctcagatccaaagttggccagcatctccattctgcaccacttcctttgtgtttatatggcgttttgtctgtgttgctgtttagagtaaataaactgtttatataaaaaaaaaaaaaaaaaaaaaaaa

SEQ ID NO: 1463 - DNA, 1511 bp, Rattus norvegicus
gatgaagggaagtggcccctggcctccacagctgaccacatgagggtggtttctagcctctttcttcctgtgctccttgcagaggtgtggctggtgagcagtttcaatctcagctcccatacaccagaggctcccattcgcctggtgtctcaggattacgagaatcaaacttgggaagagtacgaatgggctgatcccagggatgataatgaatactggctaagggccagccagcaactctccaatgagacttcaagctttgggttcagcctgcttcgaaagatctccatgaggcacgatggcaatgtgatcttctcaccatttggcctgtctgtggctatggtgaacttgatgctgggggccaagggagagaccaaagtgcaggtagaaaatgggctcaacctacaggccctgagccaggcaggacccctgatccttccagccctcttcaagagagtcaaagagaccttttccagcaacaagaaattgggcctcacccagggtagctttgccttcatccacaaggactttgaaattaaaaagacctatttcaatctatccacaatgtattttgatacagagtacgtgcctacaaattttcgaaattcttcacaagccagagggctcatgaaccattacattaacaaagagactgaggggaaaatccccaagctttttgatgagattaatcctgaaacaaagttaattctggtggactacatcttgttcaaaggcaagtggctgactccatttgaccccatcttcactgaggctgacactttccacctggacaaatacaaggcagttaaggtgcccatgatgtaccgggaagggaactttgcctctacctttgataagaagttccgttgtcacatcctcaaactgccctaccaaggaaatgccaccatgctagtggtccttatggagaaatcgggtgaccacttggccctggaggactacttgaccacagacctcgtggagatgtggctccaggatatgaaaaccagaaaaatggaggtcttctttcccaagttcaagctgaaccagaggtatgagatgcatgagctgctcaagcaggtgggaattaggaggatcttctccacctcagctgacctcagcgaactctcagccgtggcacgaaatcttcaggtgtccaaggtcgtacaacagtcagtgcttgaggtggatgaaaggggaactgaggtggtgtcagggacggtgtcagagatcaccgcttactgcatgcctcctgtcatcaaagtggaccggccttttcacttcatcatctacgaggagatgtcccggatgctcctatttcttggcagggtggtgaacccgacagttctgtgactcgggcatgtaggacctcggccaccacaggtgctgagccagaggtgtctgaatcacaagacgctgttggtagacggtaaaggatgcattctctgtacccagccagtttgctatggctgttgtctgattaacactgaaattaaaatgactcatactttaaa

SEQ ID NO: 1464 - DNA, 1944 bp, Rattus norvegicus
gggcagggcggggggtgtgtgcacgctcgagctttcgggccacagccaccgccgcgcgagctagaagcgccctagcccggcaagctggctcacccgctggccgcccagcacagcccgctggcccctctcctgcagcccatctggcggagggcggcggcggtggcggaggcaggaggatggcttcagaactggcaatgaacaattccgacctgcccaccagtcccctggccatggaatatgttaatgacttcgatctgatgaagtttgaagtgaaaaaggaaccggtggagaccgaccgcatcatcagccagtgcggccgtctcatcgccgggggctcgctgtcctccacccccatgagcacgccctgcagctcggtgcccccgtcccccagcttctcggcgcccagcccggcctcgggcagcgaacagaaggcgcacctggaagactactactggatgaccggctacccgcagcagctcaacccggaggcgctgggcttcagcccggaggacgcagtcgaggcgctcatcagcaatagccaccagctccagggtggcttcgatggctatgcgcggggcgcgcagcagctggccgcggcagcgggggccggcgccggcgcctccctgggcggcagcggcgaggagatgggccccgccgccgccgtggtgtccgccgtgatcgccgcggccgccgcgcagagcggcggggcacctcactaccatcaccaccaccaccacgccacggggcaccaccaccacccgacggccggcgccccgggagccgcgggtagcgcgtccgcctctgcgagcggcgcgggtggcgcgggcggcggtggcccggccagcgccgggggcggcggcggcggcggcggcgggggcacggcgggggcggggggcgccctgcacccgcaccatgccgcgggaggcctgcacttcgacgaccgcttctcggacgagcagttggtgaccatgtcggtgcgtgagctgaaccggcagctgcgcggggtcagcaaggaggaggtgatccgactgaagcagaagaggcggaccctgaaaaaccgcggctatgcccagtcctgccgcttcaagagggtgcagcagagacacgtcctggagtcggagaagaaccagctgctgcagcaggtcgaccacctcaagcaggagatctccaggctggtgcgcgaaagggacgcctacaaggagaaatacgagaagttggtgagcagcgggttccgagaaaactgctcgagcagcgacaacccttcctctcccgaatttttcatgtgagtgtgacacgcgatcccagctagccaccttgttaaatgctccgtgggggtccggctcctgagtgggcttgccagtttgcagggccacgctcgccaccacctcgccccctcccctggcgagtttgctccccttggccctgcacgcacacacacacacacacacacacacacacacacacacacacacacacacacacacacatacacacacacacacacacagcaagcttgtggtggtggtggtggctcttttgagttggggagggaaagggtatctggctcatggattgccaacctgaattcccctgtaacttgctagcttggttgttttggtcttttttattattattattactctttttacaccgcctaccccacacataccctggacttgcacaagggtcaaagatctgagcaggatacttcatgtaggacataactcacctttgaacccggccatcaagcgcctgtatattttttttcttcttcttctttagttcatgagctggtgttcattctctgtgtgtgtgtttttttattttgtttggattttcttttttcttctttgtttttgtttattattactaatttttttggagcttgctgtgtttcccagcctctgccctccctccctctgcaccatgttcttgagataaaag

SEQ ID NO: 1465 - DNA, 1038 bp, Rattus norvegicus
ccagaagcgctgagtgaaaatgtgctgtttggaatggggaatcctcttcttgacatctctgctgtggtagacaaagatttccttgataagtattctctgaaaccaaacgaccagatattggccgaagacaagcacaaggaattgtttgatgaacttgtaaaaaaattcaaagttgaatatcatgccggtgggtccacgcagaattcaatgaaagtggctcagtggatgattcaggagccacacagagcagcaacgttcttcggatgcattgggatagataagttcggggagatcctgaagagcaaagccgcaaatgcacacgtggacgcccattactatgagcagaacgagcagcccacaggaacgtgcgctgcatgcatctccggtggcaaccggtctcttgttgctaacctccgtgccgccaattgttataagaaagaaaagcaccttgatctggagaacaactggatgttggtagagaaggccagagtttactacatagctggcttctttctcaccgtctccccagagtcagtgttgaaaatggctcgctatgctgccgagaacaacaggaccttcactctgaacctgtccgcaccgttcattagccagttcttcaaggaagccttgatggccgtcatgccttatgttgacatcctctttggaaatgagacggaggctgccacttttgctagagagcaaggctttgaaactaaagacattaaagaaatagcccgaaagacgcaggctcttccaaaggtgaactcgaagaggcagaggaccgtgatcttcacccaagggagagatgacactatagtggctacaggaaatgatgtcactgcttttcctgtcttggatcaaaaccaggaagagatcgttgacaccaatggagctggagatgcatttgtaggagggtttctgtctcagctggtctccaacaagcctctgactgaatgcatccgggccgggcactatgcagcgagcgtcatcattaggcgaactggctgtacttttcctgagaagccagacttccactga

SEQ ID NO: 1466 - DNA, 353 bp, Rattus norvegicus
ggagactaactatagtaacaaattggcccaacaggcctgtagatgccaagcaggaactgggtttagattccaagtagtaatttaaagaaaaaaagtttgaataaaggacaatgccagcttctgccactttcgctttcccaggatcccacctgctcagctgtagatgactatcctggcacacactgaaatgtcgtgagggaacccacgctgagacccgctcgatccacacatcattgcctacgctgacataaggaacccgtgtcctgagtctttgattgagaagattctgactgttcagtgttctctttcacaaaattggttttcaaataaatatattaaaatctccacattgc

SEQ ID NO: 1467 - DNA, 3003 bp, Rattus norvegicus
gcgcccgccccgagagggtagcagatagtccctcggagtctccgccccaggggcatgtggagggtgtccaccgattaggatcgggtccgagtgattgaccacggggcccggagggtccgaacctggagcgcagcctgcaccctccaccacccgcccttctggaatgtcagaactaagccaagaggcaggtgcaccggaaaattgtgactgagccttcttggcagaagagaaactgagtcaccagtccaggaaccgcagggctgttggcgctcacctcgagtcttctggctgctttcctatttgctccctgcaggctccccctgtcctcctcctggggcacatcatgaatggtgccccttccccagaggatggggttttcccttctccaccagcgctgccaccaccccctcccccaagttggcaagagttctgtgagtcccatgcgagggctgctgccctggatcttgctcgccgttttcgcctctatctggcctcccacccacaatatgcagagccgggagcagaggctgccttttctggccgttttgctgagctcttcctgcagcacttcgaagctgaggtggctcgggcctcgggctcactctccccacctgtcttggctccattgagccctggtgtggaaatcccaccatcacatgacctgtcccttgagagctgcagggtgggtgggcccctggcagtgttgggcccttctcgatcttctgaggacctggctggaccccttccttcctcagtctcttcctctacaacgtcctcaaagccgaagctcaagaaacgcttctccctccgctcggtgggtcgttcagtcagaggttctgtccgaggcatcctgcagtggcggggggctgttgaatctccctcccaagctgggcctctggagaccacatcaggtcctccagttctaggtggaaacagcaactccaactcctctggtggtgctgggacagttggtagggcattggccaacgatggcacatcccctggggagagatggactcatcgctttgagaggctaaggctaagtcgtggagggggaaccttgagagacggagcaggagtgatacagagagaagagctgctgagtttcatgggggctgaagaggctgcccctgacccagcaggagtaggtcgtggaggaggggcagctgggctgacctcgggaggaggagggcagcctcagtggcagaaatgtcgattactgctccggagtgaaggagaaggaggaggaggaagtcgcttggagttctttgtaccacccaaggcatcccggccccgtcttagcattccctgttctactattactgatgtccgcacagccacagccctggagatgcctgacagggagaacacgtttgtggttaaggtagaaggcccttcagagtacatcctggagacaactgatgcacttcatgtgaaggcctgggtgtctgacatccaagagtgcctaagcccaggaccctgccctgctatcagcccccgtcccatgacccttcccctggcccctgggacctccttcctcacaaaggataacacagagagcctggagttgccctgcctgaatcattcagagagtctgcctagccaggatcttcttctgggacccagcgagagtaacgaccgcctgtcgcagggagcttatggaggcctctcagaccggccgtcagcgtccttctcccctagttctgcctccattgctgcttcccattttgactcaatggaactgcttcctccagagttgccccctcggattcccattgaggaggggcctccagcagggacagttcatcccctctctaccccgtaccctcccctggatactcctgaagcagccacagggtcattcctctttcaaggggaggcagaggggggtgagggggaccagcccctctcaggctacccttggttccacggcatgctctctcggctcaaagctgcccagttagtgttagaaggaggtaccagctcccatggtgtcttcttggtacgccagagtgagacaagacgtggtgaatatgtcctcactttcaacttccagggcaaggctaagcacctgcgtttgtcactaaatgaggagggtcagtgccgggtccaacatctgtggttccagtccattttcgatatgcttgagcacttccgggtgcaccccatccctctggagtctggaggctccagtgatgttgtccttgtcagctatgtgccctcccagcggcagcaggaacggagcacctcccgtgatccaacccagccctctgaaccccctccatggacagatcccccacatcctggggcagaagaggcgtcgggggcgccagaagtggcggcagccacagccgcagcagccaaagagaggcaagagaaggagaaagcgggcggcggaggggtccaggaagagctggtccccatggctgagctggtccccatggctgaattggaagaggccatagcaccaggcactgaggctcagggtggtgctggctctagtggggacttggaggtgtccctaatggttcagctccagcagttaccactagggggcaacggagaagaagggggtcacccccgagccattaataaccagtactcatttgtctgagatacctgcccaccctccattttcctgctcccagccttaagttgtgagactgggctgggtaaggacacagaggaaagtgggagtcccctccctacatgcttcctgacccttgtcagccaagggtgtgtatgttggtacaagtagaggttcaagagcccagttaagtccccagttactacactacaggtgcccttgccccgaggccaaggacttgggctccattacctccctgaggggctcttatggtcagccccatccctgggggctgtttcccccactaataacccccaacccaagcaagggtgagggggaagggctgtcagttatattaaggttgttgttgttgttttaaaccaaatggaaaagcataaataaataaagggtttatc

SEQ ID NO: 1468 - DNA, 432 bp, Rattus norvegicus
gagatgcagaggatgattgctgatgtggatacagactccccccgagaggtcttcttccgtgtggcagctgacatgtttgcagacggcaacttcaactggggccgggtggttgcccttttctactttgctagcaaactggtgctcaaggccctgtacactaaagtgcccgagctgatcagaaccatcatgggctggacactggacttcctccgggagcggctgcttgtctggatccaagaccagggtggctgggatggcctcctttcctacttcgggacccccacatggcagacagtgaccatctttgtggctggagtcctcactgcctcactcaccatctggaagaagatgggctgaggcttcctgctgccttggactgtgtcttttcttcataaattatgacatttttcctgggatgaatgggtaacgaga

SEQ ID NO: 1469 - DNA, 8810 bp, Rattus norvegicus
agcttcgactcgctgttgcggcgcgatcgagacccaggcgcggctcggaacggccagccgccgtgagccccacgccacacgcgatgcgggccgttctgccgggacccgtgcctccggggccgcgcgtcgcgctcctgctgccgctcctgctgctgctgctcgtggcggccgcgggctccgcgcagggccaggccgtggacttggacgccttgtgcagttacacatgggaagctgttgattccaaaaataatgcagtttataaaatcaacccctgtggacatgtggataatcccaggtgtgggccgacaagtgctgtctgtatgtgtgacctaaagtcagaaaactgccggtcagtgggtgactcacttttgagaagttcagccaaatcactcctggaatttaacaccactacgggctgccagccttcagagcacagaatccagactagcattacatttctgtgtgggaagaccctgggaactcctgaatttgtaactgccacagactgtgtgcattacttcgaatggaggactactgcagcctgcaagaaagacatatttaaagctgataaggaggtgccatgctatgtatttgatgacaagttacagaagcatgatttgaacccactgatcaagctgaatggcggctacctggtggatgactctgacgctgacgcatctctgttcatcaatgtgtgtagagacatagactcccttcgggaccccagcacacagctgagagtctgccctgctggcactgctgcctgtctgctgaaggggaaccaggcatttgatgttggccggcccaaggaggggctgaagctattgagcaaggacaggctcgttctgacttatgttaaggaagaaggagaaaagccagacttctgtaatggtcacagccctgcagtgacagtaacatttgtgtgcccatctgagcggagagagggcaccattcctaaactcactgccaactgtcgctatgaagttgagtggatcactgagtatgccagccacagagattacttggagagtgaaacctgctccctcagcagtgagcagcatgatattgctattgaccttagtcccttggcccagcatgaagaagggtccccctatgtagctgatggaggagaatataggttttttatgaatgtctgtggggacacaaaggtctcactctgtaacaaagaggctgctgtttgtcaagagaaaaaggtggattccactcaagtcaaaatagcaggaagacaccagaaccagacactccggtactcagatggagatctcaccctaatctattctggaggtgatgagtgtagttccggcttccagcggatgagtgtcataaactttgagtgcaacaaaaccgcaggtcaagatgggagaggagagcctgtgttcacaatcgaggtggactgcacatacttcttcacgtgggacactaaatatgcctgtgtaaaagagaaggaagatctcctctgcggggccatcgacggcaagaaacgttacgacctgtctgtgctggctcgtcactcagaatcagaacagaattgggaagcagtggatggcagccaggctgagtcagaaaagaggaatttcttcatcaatgtctgtcaccgggtgctgcaggcgggaaaggccaagaactgtcctgaaggtgctgccgtgtgtgctgtggataagagtggaagtaaaaatctaggaaaatttgtctcttctcctacaaaagagaaaggacacattcagctctcttactctgatggcgatgactgtggtaatgataagaaaataacaactaacatcacatttgtgtgcaaaccaggtgatctggaaagtgctccagtgctgagagctgcagggcccgatggctgctcctatgagtttgagtggcacacagctgctgcctgtgtcctgtcgcagacggagggagaaaactgcactgtccttgatgctcaggcagggttttcttttgatttgtcactcctcacaaagaagaatggtgcatataaagttgagacagacaagtatgacttctacataaatgtttgtggccctgtatccgtgaacctgtgtcagtcaaactcaggagcctgccaggtagcaaaaagtggtaagtcttggaacttggggctgagtaatactaagcttacgtactatgatgggatgatccagctgagctacaggaatggcacgctgtataacaatgaaaagcacacaccgagatccacactgattaccttcctctgtgaccgtgatgctggagtgggcttcccagaatatcaggaagaggacaactctacctacaacttccggtggtacaccagttatgcttgcccggaagagcccctggagtgcatggtgacagacccctccatgatggagcaatatgacctctccagtctagtgaagtttgaaggtggccgtggaggaaactggtatgccatggaaaactcccgagaacatttcacacggaggaaatactacctcaacgtgtgccggcctctaaatcctgtgccaggctgtgatcgatatgcatctgcttgccagagtaaatacgaaaacaatgagggctccttggcagagactgtggccatcagtaacttgggagttgcaaagacaggccctgtggtggaggagagcggcagcctcctcttagagtatgtgaacggctctgcgtgcaccaccagtgatggccggctaaccacctacagcaccaggatccatcttgtgtgtggtcgaggaactatgaattcccatcccatattcactttcaactgggaatgtgtggtcagtttcttgtggaacacggaggctgcctgccccatccagacgatcacagattcagaccaggcttgctctataagggaccccaacagcggatttgtgtttaatctgagcccacttaactattctcaaggacacatggtcttaggcattgggaagacttttgtgttcaatatctgtggtacaatgcctgcctgtggaacggttgcagggaagccagcccttggctgtgaggcagaaactaagatcaaagacattaaggatctgaagccagaaaggccagtcgggatggagaagagcctccagttgtctgccgaggggttcctcactctgacctacaaaggctcttctccttctgacagaggcacagccttcatcatccgtttcatttgcaatggtgacatttacccagggacccccaagttcctgcatcaggacattgactctgcacgagggatccggaacaccttctttgagtttgaaactgcattggcttgtattccttctgtagtggattgtcaagtgactgacccagctgggaacgagtacgacctgagtgccctgagcatggtcaggaagccgtggactgctgtggacacgtctgtgcatgggaagaagaggcgcttctatctgagcgtgtgcaccccactgccttacattcctggctgcgatggcattgcaatggggtcctgcatggtgtcagaagacaaaagtcagaacttgggtgtggtgcagatcagtcctcaagctactggaaacggatctctcagcatcctgtatgtgaatggggataggtgtggaaaccagcgctactccaccaggatagtgttcgaatgtgcccagacgtcgggctcacctatgttccagctcctgaacaactgtgagtatgtgtttgtgtggcgaacagtggaggcctgccctgtggtcagagaggaaggagacaactgccaggtgaaagaccccagacacggcaatttgtatgacctgaagcccctggccctcaatgacaccatcatcagtgctggcgagtacacctactacttccgggtctgtggaaagctgtccttagatgtgtgctctgcccatgatgggtccaaggcagtctcatcatgccaggaaaagaaaggaccacaaggattccagaaagtggcagggctccttaatcagaagctgactttcgaaaatggactgttgaaaatgaactacagtgggggggacacctgccataaggtgtatcagcgctccacaaccatctatttctactgtgaccggacgactcagaagccagtgtttctgaaggaaactttggactgctcctatttgtttgagtggcgaacacagtatgcctgcccacctttcaatgtgacagagtgctctatccaggatgaggctggcaactccattgacctctcctcactgtcaagatacagtgacaactgggaggctgtgaccaggacaggggccactgagcattacctcatcaacgtatgcaagtctctgtctccacaggctggcacagatccatgccctccagaggcagctgtttgtctgctggatggctccaagcctgtgaacctcggcagggtgagggatggtcctcagtggacagctggtgtgactgtcctgaagtatgtggatggtgacttgtgccccgacaaaattcggaaaaggtcaaccattattcgcttcacctgcagtgacagccaagtgaactccaggcctctgttcatcagtgctgtacaggactgtgagtacacattttcctggcccacacctgctgcctgtcctgtgaagagcaacatacacgatgactgccaagtcaccaaccccagcacaggccacctgtttgacctgagctccctaagtggcaaagctggcatcacagcctcctacagcgagaaggggatggtcttcatgagcatctgtgaggagaatgtgaactgtagccctggagtaggggcctgctttggacagaccaggatcagtgtgggccaggccagcaagaggctgagctacaaggatcaggtcttgcagctggtgtatgagaatgggtccccatgcccctccaagtcaggcctgaggtacaagagtgtcatcagcttcgtgtgccggccggaggctggacccaccaacaggcccatgctcatctccttggacaagcagtcgtgtacactcttcttctcctggcacacgcccctggcctgtgagcaggcgacggaatgcaccgtgcggaatggaagctcgattattgacctgtcacctctcatccaccgcactggtggttatgaagcatacgatgagagtgaggacgacacctctgataccacccctgacttctacatcaacatctgtcagccactgaatcccatgcatggagtgccctgccctgcaggcgcctcagtatgcaaagtccccgtggacgggccccctatagatattgggagagtcacaggccctccaatattcaatcccgtggccaatgaggtctacctgaactttgagagcagcactccttgcttagcggacaaatatatgaactacacctcactaattgcgtttcactgcaggagagggatcagcatgggaactcctaagctgataaggaacaatgactgtgactttgtgtttgagtgggagactccgattgtctgtcctgacgaagtgaagacacagggctgtgctgtaacagatgagcagctgctctatagcttcaacctgacgagcctttccacaagcactttcaaagtcactcgggacgctcacacatacagtataggggtgtgcacaacggcagctgacttagaccaggaaggctgcaaggacggcggggtctgtctgctctctgggagcaaaggagcttcttttgggcgcctagcgtcgatgcagctggattacaggcaccaggatgaagcagtcatcctgagttatgtgaacggtgatccttgccctccagaaacggaagatggcgagccctgtgtcttccccttcatttacaaaggggagacctatgacgaatgtgtattagagggacgagcgaaactgtggtgtagcaaaactgcgaattacgatcgtgaccacgagtggggcttctgcagaccgagcaacagtcaccggatgtctgcgatcatatttacttgtgatgagaacgaagatattgggaggccagaagtgttcagtgaagatcgtgggtgtgaggtgacatttgagtggaaaacaaaagttgtctgccctccgaagaagatggagtgcaagtttgttcagaagcataaaacctatgacttgcgattgctctcatccctcacggggtcctgggattttgtgcatgaaggaaactcgtactttatcaatctgtgccaaagagtatataaaggtcccctggactgctctgagagagccagcatttgcaagaagagtgccactggtcaagtccaggttttggggcttgttcatactcaaaaactggaagtcatagatgaaacagtccttgtcacttactcaaaaggccattcttgtggtgggaataagactgcatcctcagtgatcgagttgacctgtgcaaagactgtgggcaggcctgcattcaagaggtttgatattgacagctgcacctactacttttactggtactcacgggctgcctgtgctgtgagacctcaggaggtgaacatggtgaatggaactcttaccaaccctgtgactggcaagagcttcagcctcggggaaatttattttaagctgttcagcgcctctggggacatgagaagcaatggggacaactatctgtatgagatccagctctcctctatctccagctcttctaaccctgcgtgctccggtgccaacatctgccaggtgaagcccaatgaccagcacttcagcaggaaagtgggcacctctgacatgaccaagtactacgtccaagacggtgatctggatgtggtgtttacctcttcctccacgtgtggcaaagataagaccaagtctgtgtcttccaccatcttcttccactgtgaccctctgctgaaggacggggtccccgagttcagccacgagactgctgactgccagtaccttttctcctggtacacttcagctgtgtgtcctctgggtgtggactttgatgatgagaatgctgtgccagagtataaagggctctcagagcggagtcaggccgttggggcagtcctcagtctcctcctggtggcactgactggctgtctgctggccttgctgcttcataagaaggagagaagggaaactgtgataaacaagctgaccaattgctgcagaaggagctcgggggtgtcctataagtactcaaaggtcagcaaggaggaggagacagatgagaatgagacagaatggctgatggaagagatccaggtgccagcccccagactaggcaaggacgggcaggagaacggccacattaccaccaagacggtgaaagcagaagctctcacttccctgcatggggatgaccaagacagtgaggatgaggtcctgaccatcccagaggtgaaagttcacacaggcagaggagccgaggtggaaagctcacagcccctgagaaatccccagcgcaaggtcctgaaggaaagggagggggagaggatggggctggtccgcggtgagaaggccagaagagggaagttcagacccggacagcgcaagccaacaacccctgccaagctggtgtccttccatgatgacagtgacgaggacctcctacacatctgactccgtggtgcctacaggagaaggtggcaccatggacagccaagcatctccaaccaaataagacttcagctcgatgatgcgtctgtcattttgcctttaacaaaactgcttcaaagggaagtttctgtaatgggggagaggatgggggaggtgggcaccactcttccatgatcgtttacagtcagtggaacaaggtgttgcttgaatcggccaaagggcgctacttggtgcccagggttttgccccaagtcctcacttacgatcatagctgctgtgtgcttccaacaggtgcccaggccacatgcatctcacaacagagggctgtgtttgaaaaaaacccttgctgctttagaccctatagggtgaccatttatatttttagcattgtaattctctccccctatttattgactttgacaattactactcaggtttgcgaaaaaggaaaaaaaaaaaaaaaccagtttcttctgccagcaagggcataaggtgaagctggcattatgctggagccttgtacgtggctcctgagctggtccttgatgcacactttagtgagctgcagtattctattcttcgctttgcgttttgtaagggcacacatacatgcacaggtccccgagtgcctcggtttgggaaggcccgcctgctccgtgccctacctcgtctctatagctgcagctctttgcacgaatccttctgggtgtcgcttttgcccgctggtgagcgccagcagctcacccagaggtgggtgtttgtgcatgcgatggagtagaggctcttggagaggagccgcacttcaggtttgggctgtaggtctcatctcttcaggttctcaatgccacctttactgtgctttttgcttttattttaagggggaaatgtttatcacccattcaacctataagaagccttaatttgcacagggtgacttacagacaccgtgaaatacggtgggccagtgttgtgtgtgggcttgtgcagggcagtgtcccgggatggaaggccaggcccggtccactggctgtggactcctttcctgatgtgttcaatgacttctcacattatagagttgtatataggtggtatttacatacccagaagcaaagtaccccgcagaatttcttggtttatgcctgattttgctagcttatttgatttcacattgagtgtatttttaaaaattgatttttttcttcattttttaatcaactttactgtaatatgaagtattcaatttcaataaaaataaattattaaaaaaaaaaaaaaaaaaaaaaaaaaaaa

SEQ ID NO: 1470 - DNA, 1201 bp, Rattus norvegicus
agatggcggcagccgaggccgcgaactgcatcatggaggtttcctgtggccaagcagaaagtagtgagaagcccaatgctgaggacatgacatccaaagactactactttgactcctatgcccactttggcatccacgaggagatgctaaaggatgaggtgcgaaccctcacgtaccgcaactccatgtttcacaatcggcatctcttcaaagacaaggtggtgctggatgtgggctcgggcactggcatcctctgcatgttcgctgccaaggcaggggcccgcaaggtcattgggatcgagtgctccagtatctctgattatgctgtgaagattgtcaaagccaataagttagaccacgtggtgaccatcatcaagggcaaggtggaggaggtggagctgcctgtggagaaggtggacatcatcatcagcgagtggatgggttattgcctcttctatgagtccatgctcaacactgtgctgcacgctcgtgacaagtggctggcacctgatggcctcatcttcccagaccgagccaccctgtatgtgacagccattgaggaccgacagtataaagactacaagatccactggtgggagaatgtatatggctttgatatgtcctgcattaaagacgtggccatcaaggagcccctggtggacgtggtggacccaaagcagctggtcaccaacgcctgcctcataaaggaggtggacatctacacagtcaaggtggaggacctgaccttcacctccccgttttgtctgcaagtgaagaggaatgactatgtgcatgcactagtggcctacttcaacatcgagttcacccgatgccacaagaggaccggcttctctaccagtcctgagtctccatacacacattggaagcagactgtgttctacatggaggactacctaacagtgaagaccggcgaggagatttttggcactattggaatgaggcccaacgccaaaaacaatcgtgacttggactttaccatcgacctggacttcaagggtcagctgtgtgagctctcttgttccaccgactaccggatgcgctgaggaggtgccaggctggccctcctgcaaaagggggctcaggggctgggcttgggggatgggagggtacatcgtggcagtgtttttcataacttatgtttttatatggttgcgtttatgccaataaatcctcagctgac

SEQ ID NO: 1471 - DNA, 2481 bp, Rattus norvegicus
tctcactatagggctcgagcggccgcccgggcaggtcggctggcgaggacacgtcaggggacataaataaataaataattccattcagcggatgacagcgaggcgaggcggctgcagctgggcggggggaccgggagagcagcggtgcgcaccgggtgtcagagccagagctgaggaccgaacccagggccttgcacttgctaggttgttttcgtctccagtagaagctcagaaatgccatcagagtcttcagtaaaggcaacggcggcgccgcctccattcccacttcctccggacggagggtggggctgggttgtagtctgcgcatccttcatctccattgggttctcctatgccttccccaaagccgtcacggtattcttcaatgacatcaaggacattttcaagaccacctccagtcagatcgcgtggatatcctccattatgctggctgtcatgtacgcaggaggtcccatcagtagtgtgttggtgaataactatggcagccggcctgtggtgatagtaggaggattactgtgctgtactggaatgatcttggcttctttcagcagcagtgtgatagaactttacctcaccgtcggcttcattggaggtttaggattagcattcaacctgcaaccagccttaacaataatcgggaaatacttctataggaagcgaccccttgcaaatggctttgccatggctggaagtcctgttttcttaagcacactggctcctttcaatcagttcctatttaacagctatggctggaaggggagttttttgattttgggggccatatttttgcactcctgtgtggccgggtgcctcatgagacctgttgggccaagtccacgtgctgcgaagtctaaaagtaaggttggctcaagacaagattcaagtacgaagagactcagtaaggtatcaacagcagaaaagattaatcggtttttagatttcggcctttttacacatagaggatttttgatctacctgtctggaaatgtcgtgttgtttttagggatgtttgcccctattatattcttggctccgtatgctaaggacaaaggagtggatgactataattcagctttcttgctgtctgtgatggcttttaccgatatgtttgctcggccttcggtaggattaatagccaacactagcttaatccgtccacgaatccagtacttgttcagcgtggcaatcatgttcactggcatatgccatctcctctgccccctagcccattcctacacagctttggtggtctacgttatattttttggaataggatttggaagtattagcagtctcctctttgaatgtcttatggaccaggttggagcctccaggttctccagtgctgtggggctcgtcactatcgtggagtgttgcccagttcttcccggccctcccctggctggtaaattgctcgatataactggacaatataaatacctgtacatagccagtgggatagtcgtgttatcatcaggcatttacctactgatttgcaatgctataaactatagacttctcgagaaggaaaggaagagagagaaagcaaggaggaagaaatcagcctcgcaggcatccaaagaaatggaggctttgagcagatctaaacaggacgatgttactgtgaaagtttcaaatacacacaatcctccctcagacagggacaaagaaagtagtatttaacaagtctcatctccgaatcagtgttcagaaatttaattatgagtttctttgtgtttttttcaatgaattgcaaaggattttagctgcaacaaaagatcgcaaacagtaacgaaactggtatcttcctcaatgacgaactaaaaatcagtgctttaatatttgttaaagatggttaacttttgagattgtgcacataaaaaatccacacagctgcttatctgcacaccaaagctgtgatgaaaatgaatttttttaaatcttctgccaacttttacttttagctatagaatgagatctgcatcccagaccccggctgacctaagcacaattcaacattaattccacataactaccctcttcaaggttcatttttcgtcggatactaagtcatgaagtgaattgaagacaatcattctttctattcaacacacaaagaattacacatgtagccacgcaaacactgagtaacgggatatcataaagaaataaatgaatttgagaaaattattatcatagtcatttttaagtcaaaggaaataagactctggcaagtgggaatgtaatatatttgtgtgcagtcatccagtgtggtttccaaataacagtctatgttgaaaattcaagtgttattaactcaaaacacgctaaaggggaaactatctacagtgggtgagtttggctaaacccccacacagctctactagttttcaccatcactctgccacatttgtgcctattttatccacatcacctgtctgcactgtttcagcacaatag

SEQ ID NO: 1472 - DNA, 4377 bp, Rattus norvegicus
tgcggagccgctggagcggagcggtgttagcggcgttgctggaagatggcgagcggctgggatgagcggccgccctggcggctggaaagcctgcggctgctaccgccgccaccgctgctgctgctactgctgctattgaggagctcggcccaggcggcgcacatcaagaaggctgaggcgaccacgacgaccgtcggcggctccgaggcggccgagggccagtttgaccactactaccacgaagcggcgctgggcgaggcactggaggcggcagcggccgcggggccgcctggcctggcccgtctcttcagcatcggcaattcggtggagggccgaccgctgtgggtgctgcgcctcacggctggcctggggccgccgcccacccccgccgccgtggggctggacgccgcggggccgctgctgcccggccgaccgcaggtgaagctggtgggtaacatgcacggcgacgagacggtgtcgcgccaggtgttggtctacctggcccgtgagctggcgtcgggctaccgccgcggggacccgcgcctggtccgcctgctcaacaccaccgacgtatatttgctgcccagcctgaatccggatggcttcgaacgcgctcgcgagggtgactgcggcctcggcgacagcggtccgcctgggaccagcggccgagacaacagccgaggccgcgacctcaaccgcagcttccctgaccagttcagcacgggggagccaccttccctggatgaggtgccagaggtgcgcgccctcatcgactggatccgcaggaacaagtttgtgctttctggaaatcttcatggtggctcagtggtagcaagctatccttttgatgattctcccgagcataagaccactggaatctatagcaaaacctccgatgatgaagtctttcgatacttggcgaaagcttatgcttctaaccaccctataatgagaactggtgaaccccattgtccaggagatgaagaggagactttcaaagacgggatcacgaacggtgcgcactggtatgatgtggaaggtggtatgcaagattacaactatgtgtgggccaactgttttgagatcacattagaattatcttgctgcaaatacccacctgcttctcagcttcgacaagaatgggagaacaaccgtgagtctttgatcacattgattgaaaaggtccacattggaattaaaggatttgttaaagactcagtcacaggctctgggttggagaatgcaaccatctcagtggctggtattaatcataatatcacaactgggagattcggtgatttccacagactgctcattcctggaagttacaatcttacagcggtttcacctgggtatatgccgttgactattaataatatagtggtgaaagaaggaccagccacagagatagatttctcccttcaaccaactgtgatgtcagtagtgcctgactcgactgaggctgtgacaactcccggcacagttgccgttcctaatattcctcctggaacaccatcgtcccatcagccaattcagcctaaagactttcaccaccaccattttcctgacatggaaatcttcttgagaagatttgccaatgaatatcctaacatcactcgcctttattctctgggaaagtccgtagagtcgagagaactgtatgtgatggagatatctgacaacccaggcgtccatgaaccaggtgaaccagaatttaaatatattggaaatatgcatggaaatgaagtggttggaagagaactgctattgaatctcatcgaatacctctgcaagaactttggaacagaccctgaagtaacagatttggttcgcagcactagaattcacctcatgccatccatgaatcctgatgggtatgagaagtcccaagaaggagactcgataagtgtagttggcagaaacaacagcaacaactttgacctaaaccgaaatttcccagaccagtttgttccgatcacagatcctacccaacctgaaactatcgctgtgatgagctgggtgaaggcctatccgtttgtgctgtcggccaatctgcatggaggttccttggtggttaactacccttatgatgataatgaacaaggagttgccacatacagcaaatcaccagatgacgccgtgtttcaacaaatagcactttcttattccaaggaaaactcgcagatgttccaaggtagaccttgcaaagacatgtaccttaatgagtattttcctcatggcataacgaatggagcgagttggtataatgtcccaggtggtatgcaggactggaactatttacagacgaattgctttgaagtaaccatcgaactaggttgtgtgaaatatccattcgagaaggaactgccaaagtactgggagcaaaaccggagatctctaatccagtttatgaaacaggttcatcagggtgtcaaaggatttgttcttgatgccacagatggtaggggcatattaaatgccaccctcagtgttgctgaaattaatcacccagtgacgacttacaaagctggagattactggcgtctcttggtcccagggacatataaaatcacagcatctgctcgagggtataaccccgtcaccaagaacgtgaccgtcaggagtgaaggtgctattcaggtcaacttcacacttgttcgatcttcaacagatgcaaacaatgagtcaaagaaaggaaaggggcatagcaccagcactgatgacaccagcgacccaacttctaaggagtttgaagcactgatcaaacacctttcggctgagaatggcttggaaggcttcatgttaagctcgtcctcagacctggctctgtatcgataccattcctacaaagacttatccgagttcctgagaggactcgtaatgaactacccacacattacaaaccttaccactttgggacagagtgttgaatatcgtcacatttggtcccttgaaatctccaataagcccaacatatcagaacctgaagaaccgaagattcgttttgttgctggtatccatggaaacgctccagttggcactgaactgcttttggctctggcagaatttctttgcctgaattacaaaaagaatccagttgttacccaattggttgacaggactagaattgtgattgtcccctctctgaatccagatgggagagagcgagcacaggagaaagactgtacctcgaagactgggcacacaaatgcccgtggcagggacctggacacagacttcacaagtaatgcttcccaacctgagaccaaagccatcattgaaaacttgattcaaaaacaggatttcagcctttccattgctttagatggtggttctgtgctggtcacatatccgtacgacaagccagtccagacagtggaaaacaaagaaacgttaaagcatctggcgtctctttatgcaaataaccacccatcaatgcacatgggtcagcccagttgcccaaataattcagatgagaacataccaggaggagtgatgcggggagcagagtggcacagtcacctgggcagcatgaaggattatagtgtcacctatggccattgcccagaaatcacagtatacacaagctgctgctacttcccaagtgcagctcaactccctgccctatgggcagagaacaagaagtctctcctcagcatgctggtggaggtccacaaaggagtccatgggttagtaaaagacaagactggtaaaccaatctctaaagcagtaattgtactcaatgaaggaataagagtacacacaaaagaggggggttatttccatgtgcttttagctcctggggtccataacatcaatgccatcgctgatggatatcagcaacagcattcacaggtctttgtgcatcatgatgcagccagttctgtggtgatagtctttgatacagataaccggatatttggtttgccaagggaacttgtggtaactgtgtcaggtgccaccatgtcagcgctgatcctcacggcttgcatcatttggtgcatctgctctatcaagtctaacagacacaaagatggcttccaccggctgcggcagcatcatgatgaatatgaagatgaaattcgcatgatgtcaactggctctaagaagtcccttttaagccatgagttccaggatgaaacggacacagaggaagagacattatattctagcaaacattgagaagcacggtttgcatatctccctgcttaagtaccaggcaaatgacagctcctcttgggagacactgcagtaagaagagagattccttcctccttcaaagagctttgggaagttagcctgctaaattcatactctctgaatgtcacaggcagttttgaacttcccttccttaaaagtactcttaaccttttcctt

SEQ ID NO: 1473 - DNA, 3780 bp, Rattus norvegicus
gggcgacagcaatgtggcacatccctcctcggaagtgaagggacagaagcgtcctaggcctctccacccttgctgacggcttcgcgccaagggctgccatggccacggggttctcctttgggtccgggaccctcggctccaccactgtggcccccggcggcaccggcacaggcagcggattctccttcggcgcgtccagcacaccttctgtggggctcaacttcggaactctcggaagctctgcgacaccagcatctacatctacttctgccagtggttttggaacaggactctttggatctaagcctggcactggattcactctaggaggaacaagtgcaggaacaacagctactacatctgcatctacaacaggctttagtttaggattcagtaaacctgcagcatctgccacaccatttgccctgcccgtcacttctaccacagctagtggtcttactctctcgtctgctctgacatcagctccagcagcatccacaggatttacgttgaataacttgggagcaacaccagccacaactacagcagcatcaacaggactttccttagggggggccttagctggtttgggaggttcacttttccagagtggaaacacagcaacatcaggtctcggacagaatgctttaagcttgtctctggggactgcaacacctacttcagcagccagcagtgaaggccttggtggtatagattttagtacctcatcagataaaaagagtgataaaacgggaacaaggccagaggatagcaaagccctgaaagatgaaaaccttcctcctgtcatctgtcaggatgttgagaatctccagaaatttgtcaaggaacaaaaacaagtccaagaagaaattagtcgaatgtcttccaaagcaatgcttaaagtccaggaggacatcaaggccctgaagcagctcctgtcattggctgctagtgggttgcagaggaacacactcaatattgacaaactgaagttagaaactgctcaggagttaaagaatgcggaaatagctttaagaacccagaaaacaccacctggactccaacatgaaaatacagctcctgctgactacttcagagtcttggttcagcaatttgaggtacagcttcagcagtacaggcagcagattgaagaactagaaaaccatcttgccactcaagcaaacaattcacatataactccgcaagacttatcaatggctatgcagaaaatttatcaaacatttgtagctttagctgcacaacttcagtccattcatgaaaatgtcaaggtgcttaaagaacagtatctcagctacagaaaaatgtttttgggtgatgctggggatgtgtttgaagccaggagaacagaagccaagaagtggcagaatgcacccagagttactactggacccacgcctttcagcaccatgccaaacgcagcagccgttgccatggctgcaacacttacacagcagcaacagcctgctacagggccacagccgtctctgggagttagttttggaacgccattcggctcaggtattggcactggcttgcaatcaagtggcttaggttcttcaaaccttggaggatttggaactagctctggtttcggatgcggtaccacaggggcctccacatttggatttggaacaacagataaaccctcaggaagtcttagtgcaggctttggcagctcaagtacgtctgggtttaacttcagcaatcctggcatcacggcatcagctggtttgacatttggggtgtccaatcctgcgtctgcggggtttggaacaggaggacaactccttcagttgaagagacctcccgctggaaacaaaagaggaaagagatgaacctatgggtcgaggtgttggccgtgcttagctggcgccgctcattctatgattctatttttctaatgatgtagtgattgagctgcatctcgggagatttataatgttttgatattcctcactctggaacttgaactttgtttgtttaccttaccagacatccttcttgtgaactcaaaatccagttgcagttctgttgctattacttttgactccatgtaagaaatgttgtgattaaattaccaagtgatagtggtgggaaaaacaattcatcaacctaaacctatgatttttcctagtattaatagcaatttttttgttgctggggtttaagctgtgaatacatgcacattggtttcttatgcagatggtttgaactctcaggcctgtgctagaagtagtttgttccttgacaaggcctttggaactgtgctgcagggcatcttgtagatatgtatgtaattatatatagagaaatgcacacagtgtgtgcacataaaatatatttacacacctacaactcttgcctcagactgttatccttttctagtgtatttagttattcactctttatgctttaggtcctcagcgcttataaaaggagtaacttagggtacctggtcacttcgtttgttaattagacagaagtgattcttgataaagtatttaacccattcaaattcattgactccactcctgtttttatttattccttgacccttatctacgaggaatggtctaaggcgcatcaaacagattttagaaacctttattaccctatgtatatattctcgtgctacaactatggaatcttttgtaaggagattgtcttttaggagtgtacgtgaactccagactgatgctctggggcaaagagctactaagccaaattgaatctatgcaggtgaaggatgcaatgttaattcagtaagaacttgtttagctgtttcaatacagaattcttcttatagggctatggagaaaccaaatgaagtggcttctaagcctcttaatgtgctgagtcttaatctggactagagaaactacattttaggaaaactctttgtaccaactatgaacttgctggtttgaagagtgagtggagctccagtgagtgccacggagttgtgtcaggttgtgtctgtgacctctgtctgtgctgccattcttggtgtttcgtgagtgaacatccactgtgaagggaattgccttaggaccatgtcagcgagaaagtagtcttcaggtgggatgaacacatggaattgcacggaaatagtttaattttttacatagaaagttttgtatataatgttcatcagtgaatattttcaggatcattttcaccaaggcaccttttctttctaaaataggtgtggtatacatacatacatatacacatatatatttttagtataatgtcacttgtgtttgactataaaagcattgtggttctgttttatttatctgcatataacagtgattggcattcctgaattcaatatttgcatcttgatgcattaaaataaggagagttatttgtctttgagcactaaacctgtttttatttgtatattttgtaattctgcagccctcggtccagattatgggggaggataggaaagggtgtgctttggcatttgaagttactatcagagttacatatgccattacaaaacactgctttgttagtttcttaaatacggtgtattatgctgcaaatagctgagtatttatatttctctgggttacttttttctttatatacattttcatatgttgaaccactggagacttgtaacattcatttgtggtaggagtcagagtgttgtctttgtctcctttgtctttgccttgtctattatggaaataataaaattgtgttagttgctttgaaaaaaaaaaaaaaaaaaaaaaaaaaaaaaaa

SEQ ID NO: 1474 - DNA, 2196 bp, Rattus norvegicus
aattcggcacgagcaaacggagaggccgcgggaggcgcgaagccggcagaaggcgagggagagcggagggcggccatggtccagccctgaagccaaacaaaaaaggcctacttcgaaagctgtcaacaatgaatgactctaaagatgcccctaagtcctatgacttcgacctgatcatcattggaggaggctcgggaggcctggcggcagctaaggaggcagccaaatttgacaagaaggtgatggtcttggacttcgtcacaccaactcctctcggaacgaatgggggtctcgggggaacgtgtgtgaacgtgggctgcatacctaaaaaactgatgcaccaggcggctctgttaggacaagctctgaaagactcacgcaactatggctggaaactcgaggacacagttaagcatgactgggagaaaatgacagaatctgtgcagaatcatatcggctcgctgaactggggctaccgagtagctctccgggagaagaaggtcgtctatgagaatgcttacgggaaattcattggtcctcacaaaattatggcaacaaataacaaaggtaaagaaaaagtttactcagcagagcggttcctcattgccaccggtgaaaggccacgctacctgggcatccctggagacaaagagtactgcatcagcagtgacgatcttttctccttgccttactgcccggggaagaccctagtggttggcgcgtcctatgtcgccttggaatgtgcaggattcctggctggtatcggcctcgacgtcactgtaatggtgcggtccattctccttagaggatttgaccaggacatggccaacaaaattggtgaacacatggaagagcatggtatcaagtttatcaggcagttcgtgccgacgaaaattgaacagattgaagcagggacaccaggccgactcaaggtgaccgctaaatccacaaacagtgaggagaccatagaagacgaatttaacacagtgttgcttgcagtaggaagagattcttgtacaagaactattggcttagagaccgtgggcgtgaagatcaatgaaaagaccgggaagatacctgtcacggatgaggagcagaccaatgtgccttacatctacgccattggtgacattctggaggggaagctggagctgacccccgtggccatccaggcggggagattgctggctcagaggctgtatggcggctccactgtcaaatgtgactatgacaatgtcccaacgactgtgtttactcctttggagtatggctgctgtggcctctctgaagaaaaagctgtagagaaatttggggaagaaaatattgaagtttatcacagtttcttctggccattggaatggacagttccatcccgggataacaacaaatgttatgcaaaagtcatctgtaaccttaaagacaacgaacgtgtcgtgggcttccacgtactgggtccaaatgctggagaggtgacgcagggctttgcagccgcactcaagtgcgggctgaccaagcagcagctggacagcaccattggcatccacccggtctgtgcagagatatttacaacgctgtcggtgactaagcgttctgggggagacatcctccagtctggctgctgaggttaagccccagtgtggatgctgttgccaagactacagaccattgcttgcttccttgtccacacccaggtgaagttcaggaaggctcttgggttcttggcaccaattcaaggtgctatcctaaggccaccaggtccctgggatcttgtgggtaggaggtggcaggtagaagaaggctgcagcatcgcactggggtcaccatgacggactcagactgacattcggcagagcatcacggtgcgtccatgaagtcactagcctcaagcccaagtggtgggcagtgacagaaagctgtcgatctgttgggttcaacctttccctgtagactgttttagtctcgccttcaagctatgtaatgtcaattctgttttttcttttctccatggggttaatgatactagaggtagggaatgttagcaatcagtttttgtcatggctggactatccacagcacggtcgttactgtgtggaagggggtcagatggcttatgagagccaaaccagtttatcctgagaaagacgaattaccctgtggctaaaatacactgtttttactaaaaaaaaaaaaaaaaaa

SEQ ID NO: 1475 - DNA, 952 bp, Rattus norvegicus
ggcctccagcgccatgccgctcttgtgcgcgctgctgcgcagccgactccaaccttctctgctccgctcgcttacgctcacgtccgcgcaaagcctaagctgcggcggaagcagaggagtccggacctggagcgcgcggaccggacccggagcgtgcgctgaccctgcggtctctgtctctaagagggctcgagcggaagatgacgcttctctgcgtttcgtgcggctctcggagcacgctacggctcccacccgcgggtccgcgcgcgctgcaggctacgacctgtacagtgcctatgattatacaattccatccatggagaaagcccttgtgaagacagacattcagatagctgttccttctgggtgctatggaagagtggctccacgttctggcttggctgtaaagcacttcatagatgtaggagccggtgtcatagacgaagattatagaggaaatgtcggcgtcgtgctgttcaattttggaaaagagaagttcgaggtgaaaaaaggtgaccggatcgcgcagctcatttgtgagcggattctttatccagacttagaggaggtgcaaacactggataacactgagagaggttcaggaggcttcggctccacgggaaagaattaaaactttgcttgaagtactttgctgtttgaacactgtaaacgagctttaatttcagaagcattttgtgttctaggatgtaggaaaggatacctatcacggtggaactgctctgttctctagttgatggttgcctgtaaatctgtatcgtgagaactggcagtgacatgcagacttggttattagatattttttttaaatttggtattgtatttaaattatagtcctataagaactgattttgctctaattgctatattatttgtaattttttttttttatccaataagtccgaagtctttagcgaaaaaaaaaaaaaaaaaa

SEQ ID NO: 1476 - DNA, 1765 bp, Rattus norvegicus
ttgaaaaggtactggaaactgaggaccctatctggatcaaagcagtttctgatggagccctcgcctcttgagctaccagttgatgcagtgcggcgcatcgcggctgaactcaattgtgacccaaccgatgagagggtggctctccgcttggatgaggaagataaactgaagcgttttaaggactgtttttatatccccaaaatgcgggacctgccttcaattgatctatctttagtgaatgaggatgataatgccatctatttcctgggaaattcccttggtcttcaaccgaagatggttaaaacatacctggaggaagagctagataagtgggccaaaataggagcctatggccatgaggtagggaaacgtccttggattataggagatgagagcattgtaacccttatgaaggacattgtaggagcccatgagaaagaaatagctctaatgaatgctttgactgttaatttacatctcctgctgttatcattctttaagcctacaccaaagcggcacaaaattcttctagaagccaaagccttcccttctgatcattatgcgatcgagtcacagattcaacttcatggacttgatgttgagaaaagtatgcggatgataaagccacgagagggggaagagaccttaagaatggaggacatactggaagtaattgagaaggaaggagactcaattgctgtggtcctgttcagtggcctgcacttttatactggacagctgttcaacattcctgccattacacaagccggacatgcaaagggctgttttgttggctttgacctagcgcatgcggttggaaatgttgaactccacttacatgactgggatgttgactttgcctgctggtgctcctacaagtatttaaattcaggagctggaggtctggctggtgccttcatccatgagaaacacgctcacacgatcaagccagcgttagtgggatggttcggccatgaactcagtacaagatttaacatggataacaaactacaattaatccccggggtcaatggattccgaatttccaaccctcccattctgttggtctgctccttgcatgccagtttagagatctttcagcaagcaactatgactgcgctgaggagaaaatccattctgctgacaggttatctggaatacttgctcaaacattaccatggcggaaatgacacagaaaacaagaggccagttgtgaacataatcaccccatccagagcagaggaacgaggctgccagctgacactgaccttttccatttccaagaaaggcgtttttaaggaactagaaaaaagaggagtcgtctgtgacaagcgagaaccagaaggcatccgggtggccccggttcctctctataattctttccatgatgtttataagttcatcagactgcttactgccatactcgactctacagaaagaaactagccatgctttctaaataactcaagtaaatctcacacactgggggttccacttctactgcattttagtcattcaaaagtctccagaaattgatggcatagaaatgatgatgattttataaacttacataaaacctggtacatgttttaatatctgtgtcgctgatgtgctgtggactaagaagtcacattttacatgactccaacctacagatgactgtcttgatcagctgtcaccttccatggtcactgaaaggttgtgtgtttaatttgtgactgaaatgacaacattaaaatgtatctggacttcttgtataaaaaaa

SEQ ID NO: 1477 - DNA, 1548 bp, Rattus norvegicus
cgggatcatgtctgcagctatactaggacaggtctggacccggaagcttctgcctattccctggcgtctatgtgtgcccggaagatgtgtgtcctccaacttcaaggcggcagacctccaggttcaggtgaccagagagccacagaagaagccagcccctagccagcctctgctgtttgggaagacattcacggaccacatgctgatggtggagtggaacagcaagacaggctggggccctccaaggatccagcccttccagaacctcacactgcacccagcctgctccggcctgcactactcattgcagctctttgaaggcttgaaagcttataaaggcagagacaagcaggtacgcctcttccggccctggctcaacatggacaggatgctacgttctgcaaggcgcctctgcctgccagactttgacaagcaggaactgctggagtgcatccgccagctcattgaagtagacaaagactgggttcccgatggcaatggaacaagcctctatgtgcggccggtgcttattggaaatgagccctccctgggtgttggaatggtcacacaagccctcctgttcgtcattctgtgccctgtgggctcctacttccccggagactccatgacacctgtctccctcctggcggacccctcattcgtcagagcctggattggtggggtcggtgactgcaagttgggggggaattacggccccactgtggctgtgcaacaagaagcccagaagaaaggctgcgagcaggtcctctggctgtacgggccggaccaccagctcaccgaggtgggaaccatgaacatctttgtctactggactcatgaagacggagaactggagctggcaacccccccactggatggcatcatcctccccggagtggttcgacaaagcctgctggatctggccaggacttggggtgagttccgggtggcagaacgcaaggtcactatgaaggaattgaagcgggcactggaggagggccgggtgcgagaagtcttcggctcaggcactgcttgtcaggtctgcccagtgcaccaaatcctatatgaaggcaagcaactccacattcctaccatggaaaatgggccggaactcatcctgcgcttccagaaggagttgaaggctattcagtacggaaccagtgcccacgattggatgcttcgtgtgtgacgttagggaggttgtgccctacctggttggatccgctgacgtgcagcatccagttcagcgtcctcgcctcccagagactcaagagaagtgcaatagggaaggtcgttccagactgctggctctctggcaccctcacgtggaagttacactccaaagccttaagggcggacccatgtaatttggaccccacctcagttcagctcgtccgcgtcctggtgttcaagagagaaccttggcttcttctcgatctccgttctcaggcggatccccggtgctcttcatgtctttttttttttttttttccgtctctctctccttgctgcaattttgaaataaaaatgccaaagaacaagaaaaaa

SEQ ID NO: 1478 - DNA, 370 bp, Rattus norvegicus
  misc_feature (1)..(370): n = a or c or g or t
acagntgacaaccttgtgctgaatttgcaggatgaaagtttaattcggggaagngacagcttcattaagggtaagaagtgagtgtggacatcaagaaccccaccaccagagaagttggcacacttttccagtttggaggggccagctagggggtcaagcataccccaccctgacccaagcatcatgtgatggattcttctgtatctgctctcttggattaaggaagactgaagaccaaccctttcagaggggttttcctccttcttgtattggctgggaagggggggggacaggagacagtgtgatttctcagtgatttcctgtagtgttgtccctctccctgaatggggggagataaccaccatgccag

SEQ ID NO: 1479 - DNA, 393 bp, Rattus norvegicus
gacacaccttgccgatggctgaacatgtgcaattcgtgagggacacgctcacttctagccttaagggggtaggagtgatgtttcaggggaggctttagagcacgatgaggaagagggctgagctgagctttggttctccagaatgtaagaagaaaaaatttaaaacaaaaatctgaactctcaaaagtctatttttttaactgaaaatgtagatttatccatgttcgggagttggaatgctgcggttacctactgagtaggcggtgacttttgtatgctatgaacatgaagttcattattttgtggttttattttacttcgtacttgtgtttgcttaaacaaagtgacttgtttggcttataaacacattgaatgcgctttactgcccatggg

SEQ ID NO: 1480 - DNA, 178 bp, Rattus norvegicus
tttttgattgtactcttctatgctggaccgaattcatatgcagatcgaagtcactcctgttctttacagatggtattttgatagatactggagtttgtctgtgttatatctgtccccttctttaagaacaatgttgcattacgttcctttggataaattgtgatttgacaactgattt

SEQ ID NO: 1481 - DNA, 187 bp, Rattus norvegicus
  misc_feature (1)..(178): n = a or c or g or t
aatctgttccctcccacccagcccacttncccccaaccctggaaacagaccaacaacccaaactcaatttccccaaaagcnnaaaattgggagacaattttacatggactttggaaaacatttttttcctttgcattcatctctcaaacttagtttttatctttgaccaactgaacgtgnccaaaaa

SEQ ID NO: 1482 - DNA, 797 bp, Rattus norvegicus
  misc_feature (1)..(797): n = a or c or g or t
agccctgggccccacaactgcaagcagagccggagccgcccagttacagcgggacccgggcctctggggtccanacaggggtcgccatgatccgattcattctcatccagaaccgggcaggcaagacacgcctggccaagtggtatatgcagttcgatgatgacgagaagcagaagttgatcgaggaagtgcacgccgtggtcaccgtcagggatgccaagcacaccaactttgtggagttccggaacttcaagatcatctaccggcgctacgctggcctctacttctgcatctgcgttgacgtcaacgacaacaatctggcctatcttgaaggcatccacaacttcgtagaagtgttaaatgaatacttccacaatgtctgtgaactggacctggtgttcaacttctacaggttttacacggtggtagatgagattttcttggcaggagagatccgagagaggagccagacgaaggtgctgaagcagctgctgatgctgcagtcgctggagtgagggggggcttccgccccagcccggcntgntgggccaacatgcntgtttgtcccctgccaggtttgaggcccaccccagcagccccttccnttctttagntggcccagaggagtgacccagcagggtttaggccacaggggaggaggccagaacccactgcctttgggccctaagtggatggcagaggccaccgtgatgtcccgagtaactgtgccattattgtgtgatgctgtgagtgtgcgtgtgtgcagcccccaataaacctgtggtcctgcctgnaaa

SEQ ID NO: 1483 - DNA, 1604 bp, Rattus norvegicus
gcaggcctggctaaactggtgagggccctacccagccatgcccaccgtggatgatgtcctggagcaagttggagagtttggctggttccagaaacaagccttcctgttgctatgcctgatctcagcttctttagctcccatctatgtgggcatcgtcttcctgggcttcacccctggacattattgccagaatcctggggtggctgagctgagccagcggtgtggctggagccaggcagaggagctgaactacactgtgccgggcctgggaccctcggacgaggcctccttcctcagccagtgcatgaggtatgaggtggactggaaccagagcacccttgactgtgtggacccactgtccagcctggttgccaacaggagtcagttgccattgggcccctgcgagcatggctgggtatacgacactcccggctcctccatcgtcactgaggtttggccgtaagctctgtctcttggtgaccacgctggtcacatctgtgtccggtgtgctaacagcggtggccccagactatacatccatgttgctctttcgcctgctgcagggcatggtcagcaagggcagctgggtgtccggctataccttgatcacagagtttgtcggctctggctacaggagaacgacggccattttgtaccagatggccttcacagtggggctagtggggcttgccggggtggcctatgccattccagactggcgctggctccagctagctgtgtccctgcctaccttcctcttcctgctgtattactggtttgtcccagaatccccccggtggctgttgtcccagaagagaaccacgcgagctgtcaggataatggagcaaattgcacagaagaacgggaaggtgcctcctgctgacctgaagatgctctgccttgaggaggatgcctcagaaaagcgaagtccttcgtttgccgacctgttccgcactcccaacctgaggaagcacaccgtcatcctgatgtatctatggttctcttgtgctgtgctgtaccagggtctcatcatgcacgtgggagccacaggggccaacctctacctggacttcttttattcttctctggtggaattccccgcggccttcatcatcctggtcaccattgaccgcattggccgcatctacccaatagcggcctcgaatctggtgacgggggcagcctgcctcctcatgatctttatcccgcatgagctgcactggttgaacgttaccctcgcctgtcttggccgtatgggggccaccattgtgctgcagatggtctgcctggtgaacgctgagctgtaccctacattcatcaggaatcttgggatgatggtatgctctgccctgtgtgacctgggtgggatcttcacccccttcatggtgttcaggctgatggaagtttggcaagccctgcccctcattttgtttggggttttgggcctgactgctggggccatgactcttcttctcccagagaccaagggtgtggctttgcctgagactattgaagaagcagagaacctggggaggaggaaatcaaaggccaaagaaaacacgatttaccttcaggtccaaacaggcaagtcctcaagtacctga

SEQ ID NO: 1484 - DNA, 3518 bp, Rattus norvegicus
cggagacatctctgtgtcagcggtgagtgagctccccttgttcatcgacagttccagagcagactcggggctcatcataccaacagagcaggtctgttctggctactgcagccatctgagtggctttcaggtgagtgtaggggaaggactgggggcctccactggttcagcacaagcgaggcttcagtctttgctgaggaaggtaggttcactgcttctttgtcctgaccactcactccatctcacaggatgaggtacacagggctgatgggaatactgctcaccctggtcaacctgctgcagctggctgcgactctgagaattgcagccttcaacatccggacttttggggatactaagatgtctaatgccaccctctctagctacattgtgaaagtaagttcagggtggcccaagtctgagagcagacatgtggtcaggggaggtagtggctgtccttaaaccacagtgaagctgaggccttaccatacctgggtggatgtcagcccagattactgtcaacactgtccacggctggcaggtatctgacaagagtgtaagcttgagagagctgtgccgttaagagtggcagctgcggctcaggctctctgaagttctgaggccctgagctgctggtccagctctgcccgcccagcctgtcttgctcagctgttgtggccctgtcaccagatcctgagtcgctatgacattgctgtggtccaagaggtcagagacactcacctggttgctgttgggaagctactggatgaactcaatcggtgggtgacagtgctggagtcctagaatgtaatgacaaccatttacagtctcactccctctgtgctccattgatggagccttgatatcaggggccaggaggctccctgtctggtgaaaaagtacctttggtttcctttatccagggacatccctgacaactatcgctatataatcagtgagccgctgggccgcaaaagctacaaggaacagtacctttttgtgtacaggtaaacccccacactgtcaaagcccaagaacacagcctggggacatacagaccccagacctgtgccacagaggctgagagaggtttggagagcccaggcgaccctctttcccttgggaggcccttacagagcaggggtagcaatgtgtattaagaactacaggataaggctccggttgggtgaacatctacttaggcacctctcaagccccagtcacttcttgcctggtctttctttaggcccagccaggtgtctgttttggatagctatcattatgacgatggctgtgaaccctgtggaaatgacaccttcagccgagagccagccattgtcaagttcttttccccatacactggtacgtgctgttgtgctccttccagccctgctcaggccaagatggagtcgcagattgcagctcacatctagatctctagaagctggtggcagggctgctgcctacactccctcagggagctccctcgccttcagctcccagtggtctgcattaacattcactgacaaggatagtgtctcctgtgggagactgccccacatcttcatctctgcgccacagttaaagacgcccctgcataaggccccagtgtgtcttcagaccagccccaacctaggctggcctctggacactatgtcgattgcgtgtctgcttctccttagaggtccgagagtttgcgattgtgcccttgcactcagccccaacagaggctgtgagtgagatcgatgccctctacgatgtttatctagatgtccggcaaaagtggggcctggaggtgagactatcctagggacaatgggttctcttggccctgtttgtccctggaccaacaggcatgtctcctggtaggacatcatgttcatgggagatttcaatgctggctgcagctacgtcacttcctcccaatggtcttccattcgccttcggacaagccccatcttccagtggctgatccctgacagtgcggacaccacagccacatccacacactgtgcttatgacaggcaagcagccccaaagcaaaccaagccttcacttgccctttcctgctcaagaggcaggagctctggttcttgaggctcctagttttcttgtcagagtggctaccagtggatggggtcctatctgggcaccctacatgtccctgctactgcagggtccctcttagtggccctgggtggagtacattggaccctgggggcagcagagcttaaccaaggactctacgtgtcctttgctggattcctttgcaggattgtggttgctggagctctgctccaggctgctgttgttcccagctcggctgtcccctttgacttccaagcagaatacagacttaccaaccagatggtatgtgtcctttccttcatgtggtttaggttagtcagaagccagccggaaccgactgacttggcgattccggcatcgctcctgtttcccacactagatgtgggtgggggcagtgcaggccaggagcagtaggctttctacctgctcaccctctgtggtatggagagcctcactctgacgccatgtcctctgcacctccctgcctctgtaggctgaagccatcagtgaccattacccagtggaggtgacactcagaaagacctgatgtcattgagttcagccacactgcttccggtgaggaagagtccacctcacctatgtgtggtactgcggcattccaacacctcggcacagggaatgtctaccacgcggacttagaaatactgtttaattggagtaaataaagctgagcctgagcaggtagtggtactgactgtgtattaagtccttcctccccaggcaggtccatctgtcacctgagaagatgtgggctgacactagatccagtttcttggctgtcagtgtctctccagggccttgaccagaaggtcattcaggcggcctaccatggcccggggatcatcaacgagtcctgctgctatcatggcgttctcatagatctgaaacacagggatggcatagtacaatcacgatcgggggctcagggacagcctgacctacatctgaccctcagcaagagagcagcttcttacccccaaggcagagaaggatggacccagtcagactttacctgatccactagcagctgggctagctccggctcacgctccctcagctggttgagtttctttattagtgtgtgcctgcatgagcgaaccaacagcaaagtcagctgaggctaagcgtttccaacccggggcatctgctgctacacgaggattactagaacactcaaaggactgcagtgcatctgcctagcatgaaaaaatacactgattctagaagtaatctagaaagagcaacaatcactgttgagagtgtcaacatcaaaaaatgcagatggcgctgagtggcaagctcgatccacactagtaaagggaagtgtctgtaaacgaactctatgcttttaggaacgctacatggatagggaaatagcacgaaagaccactgagaaggcactgagggga

SEQ ID NO: 1485 - DNA, 2129 bp, Rattus norvegicus
gaggccgctcgagagcaggcttagggtctactgcggccggtggaccctccaacccgcttccataaggctttagctttccaacttcagctacagtgttagctaagtttggaaagaagacataaagaagaccccggtgggcagctttgctgttctttgccttagttgtcctttggggtctttcggcacaaggctgctgtgcttatagccgtgctatctccggttcctcacactcctgtgaagaagccctgggcaagagcagctaaagctactagcatccgaacaaacaaggggagagcgtctggtgccatgaccaagtcaagagatcagacccatcaggaaggatgctgtggatctttagcaaactacctgacctcagcaaaattcctcctctaccttggccactctctctccacttggggggatcggatgtggcactttgcagtgtctgtgtttctggtggaactctacggaaacagcctcctcttgacagctgtctacgggttggtggtggcaggctctgttctggtcctgggagccatcattggtgactgggtggataagaatgccagacttaaagtggcccagacgtccctggtggttcagaatgtatcagtcattctctgcgggatcatcctgatgatggttttcttacacaagaatgagcttctgaacatgtatcatggatgggtccttactgtctgctacatcctgatcatcaccattgcaaacattgcgaatttggccagtactgccactgcaattacaatccaaagggactggattgttgtcgtagcaggagaaaacaggagcagattagcagacatgaatgctaccattagaaggattgaccagctaaccaacatcctggcccccatggctgttggccagattatgacattcggttccccagtcattggctgtggtttcatttctggttggaatttggtgtccatgtgtgtggagtacttcttgctctggaaggtttaccagaagacccctgctctggctgtaaaagctgctctcaaggtagaggagtcagaactgaagcagctgacctcacctaaagatacggagccaaaacctttggagggaactcacctaatgggtgagaaagactctaacatccgtgaacttgaatgtgaacaagaacccacctgtgcctcccagatcgcagaacccttccgcacttttcgagatggatgggtctcctactataaccagcccgtatttttgggctggcatgggcctggctttcctctatatgacagtcctgggcttcgactgtatcgccacagtatatgcttacactcagggactgagtggttccatcctcagtgttttgatgggagcatcagcaataactggaataatgggaactgtggccttcacttggctacgtcgaaaatgtggccttgttcggactggtctgttctcaggactggctcagctttcttgtttgatcttgtgtgtgatctccgtgttcatgcctggaagccccttggacctgtctgtttctccatttgaagatatccgttctaggtttatacatgaggaggcagtgtcctcaactaccaaaatacctgaaacggaaatgcttatgtctaatgtgtctaatgttgtcaataccgtccatgagatgagtactaaatccgtccccataatctccgtcagcctgctgtttgcaggagtcattgctgctagaatcggtctttggtcctttgatttgactgtgacacagttgctgcaagaaaatgtaattgaatcagaaagaggcattatcaatggtgtgcagaactccatgaactaccttctcgaccttctgcatttcatcatggtcatcttggccccaaatcctgaagcttttggcttgctagtattgatttcagtcycctttgtggcaatgggacatcttatgtatttccgttttgcccsgaagactctgggcaaccagatttttgtttgtgctcctgatgaaaaggaagttacagatgaaagtcagcctaatacatctgttgtgtaaaatagtttagctgtggcccctgttactagatttgtggagagcatgtgtgcttattttgtactacagaattccaataaatgcctgcacttttaaaaaaaaaaaaaaaaaa

SEQ ID NO: 1486 - DNA, 429 bp, Rattus norvegicus
gtgaggcgaagctgagcaggaatggccctgtggacctctgtgatgggacatctggtggaatctcacaggcagttctgtggcaaagatggatgaaagctaaggactcatgaggaagctggataactgaacaaagccatgtacaagaatgggaagccagaaaatgggatggtggagtttgaatcaggtggacagttctaaaagtacaaatgatttcgtataaaggtaccacatgtgggtccctttaactgaaggcatggcaagctccacacaaggtccttcatttctgaatttcaagggctcctctgacaagtggacagtgcagtgggtgcaccttttccagaggtgactggatggatgcttgaacagaagatttgccaaatagacattgtgctgtcaagaattttaccattaaaagtgcattattgtagc

SEQ ID NO: 1487 - DNA, 3903 bp, Rattus norvegicus
aggaagcaagaaactaatcgtcttggcaacaaaacaaagagaatgaaagcacacaaacataacctcacatccaaatatgaatataaagggagcaataatcactattccttaatatctctcaatatcaatggcctcaactccccaataaaaagacatagattaacaaactggatacgcaatgaggaccctgcattctgctgcctacaggaaacacacctcagagacaaagacagacattacctcagagtgaaaggctggaaaacaactttccaagcaaatggtcagaagaagcaagctggagtagccattctaatatcaaataaaatcaatttccaactaaaagtcatcaaaaaagataaggaaggacacttcatattcatcaaaggaaaaatccaccaagatgaactctcaatcctaaatatctatgccccaaatacaagggcacctacatacgtaaaagaaaccttactaaagctcaaaacacacattgcacctcacacaataatagtgggagacttcaacaccccactctcatcaatggacagatcatggaaacagaaattaaacagtgatgtcgacagactaagagaagtcatgagccaaatggacttaacggatatttatagaacattctatcctaaagcaaaaggatataccttcttctcagctcctcatggtactttctccaaaattgaccatataattggtcaaaaaacgggcctcaacaggtacagaaagatagagataatcccatgcatgctatcggaccaccacggcctaaaactggtcttcaataacaataagggaagaatgcccacatatacgtggaaattgaacaatgctctactcaatgataacctggtcaaggaagaaataaagaaagaaattaaaaagtttttagaatttaatgaaaatgaagatacaacatactcaaacttatgggacacaatgaaagctgtgctaagaggaaaactcatagcgctgagtgcctgcagaaagaaacaggaaagagcatatgtcagcagcttgacaacacacctaaaagctctagaacaaaaagaagcaaatacgcccaggaggagtagaaggcaggaaataatcaaactcagagctgaaatcaaccaagtagaaacaaaaaggaccatagaaagaatcaacagaaccaaaagttggttctttgagaaaatcaacaagatagataaacccttagccagactaacgagaggacacagagagtgcgtccaaattaacaaaatcagaaatgaaaagggagacataactacagattcagaggaaattcaaaaaatcatcagatcttactataaaaacctatattcaacaaaatttgaaaatcttcaggaaatggacaatttcctagacagataccaggtatcgaagttaaatcaggaacagataaaccagttaaacaaccccataactcctaaggaaatagaagcagtcactaaaggtctcccaaccaaaaagagcccaggtccagacgggtttagtgcagaattctatcaaaccttcatagaagacctcataccaatattatccaaactattccacaaaattgaaacagatggagcactaccgaattccttctatgaagccacaattactcttatacctaaaccacacaaagacacgacaaagaaagagaacttcagaccaatttcccttatgaatatcaacgcaaaaatactcaataaaattctggcaaaccgaattcaagagcacatcaaaacaatcatccaccatgatcaagtaggcttcatcccaggcatgcagggatggtttaatatacggaaaaccatcaacgtgatccattatataaacaaactgaaagaacagaaccacatgatcatttcattagatgctgagaaagcatttgacaaaattcaacaccccttcatgataaaagtcctggaaagaataggaattcaaggcccatacctaaacatagtaaaagccatatacagcaaaccagttgctaacattaaactaaatggagagaaacttgaagcaatcccactaaaatcagggactagacaaggctgcccactctctccctacttattcaatatagttcttgaagttctagccagaccaatcagaaaacaaaaggagatcaaggggatacagatcggaaaagaagaggtcaaaatatcactatttgcagatgacatgatagtatatttaagtgatcccaaaagttccaccagagaacaactaaagctgataaacaacttcagcaaagtggctgggtataaaattaactcaaataaatcagttgccttcctctatacaaaagagaaacaagccgagaaagaaattagggaaacgacacccttcataatagacccaaataatataaagtacctcggtgtgactttaaccaagcaagtaaaagatctgtacaataagaacttcaagacactgaggaaagaaattgaagaagacctcagaagatggaaagatctcccatgctcatggattggcaggattaatatagtaaaaatggccattttaccaaaagcaatctacagattcaatgcaatccccatcaaaataccaatccaattcttcaaagagttagacagaacaatttgcaaattcatctggaataacaaaaaacccaggatagctaaagctatcctcaacaataaaaggacttcagggggaatcactatccctgaactcaagcagtattacagagcaatagtgataaaaactgcatggtattggtacagagacagacagatagaccaatggaatagaattgaagacccagaaatgaactcacacacctatggtcacttgatttttgacaaaggagccaaaaccatccaatggaaaaaagatagcattttcagcaaatggtgctggttcaactggagggcaacatgtagaagaatgcagatcgatccatgcttatcaccctgtacaaagcttaagtccaagtggatcaaggacctccacatcaaaccagacacactcaaactaatagaagaaaaactagggaagcatctggaacacatgggcactggaaaaaatttcctgaacaaaacaccaatggcttatgctctaagatcaagaattgacaaatgggatctcataaaactgcaaagcttctgtaaggcaaaggacactgtggttaggacaaaacggcaaccaacagattgggaaaagatctttaccaaccctacaacagatagaggccttatatccaaaatatacaaagaactcaagaagttagaccgcagggaaacaaataaccctattaaaaaatggggttcagagctaaacaaagaattcacagctgaggaatgccgaatggctgagaaacacctaaagaaatgttcaacatctttagtcataagggaaatgcaaatcaaaacaaccctgagatttcacctcacaccagtgagaatggctaagatcaaaaactcaggggacaacagatgctggcgaggatgtggagaaagaggaacactcctccattgttggtgggattgcaaactggtacaaccattctggaaatcagtctggaggatcctcagaaaattggacattgaactgcctgaggatccagctatacctctcttgggcatatacccaaaagatgccccaacatataaaaaagacacgtgctccactatgttcattgcagccttatttataatagccagaagctggaaagaacccagatgcccttcaacagaggaatggatacagaaaatgtggtacatctacacaatggaatattactcagctatcaaaaacaacgactttatgaaattcgtaggcaaatggctggaactggaaaatatcatcctgagtgagctaacccaaacacagaaagacatacatggtatgtactcactgatatgtggctattag

SEQ ID NO: 1488 - DNA, 946 bp, Rattus norvegicus
  misc_feature (1)..(946): n = a or c or g or t
atggcggcgacggcgagtcccggggctggccggatggacgggaaaccccgtacctcccctaagtctgtcaagttcctgtttgggggcctggctgggatgggcgctaccgtttttgtgcagcccctggacctggtgaanaaccggatgcagttgagtggtgagggcgctaagactcgagagtacaaaaccagtttccatgccctcactagcatcctgaaggcagaagggctgaggggcatttacactgggttgtcagccggcctactgcgccaggccacctacaccactacacgtcttggtatatatacagtgttgtttgagcgcctgactggggctgacggtacaccccctggctttctcctgaaagccctgattggcatgactgcaggtgcaactggtgcatttgtgggaccaccagctgaggtggccctcatcaggatgactgctgatggccggcttccagctgaccagcgccgtggctacaaaaatgtgtttaatgccctaattagaattgcaagggaagaaggagtccccacactgtggcggggctgcatccctaccatggctcgagctgttgtcgtcaatgctgcccaacttgcttcttactcccaatccaagcaattcttgctggactcaggctacttctctgacaacattctgtgccacttctgcgccatcatgatcagtggcctggtcaccactgctgcttccatgcctgtggatattgtcaaaactaggatccaaaatatgcgaatgattgatgagaagccagagtacaagaatgggctggatgtattgctgaaagtcgtccgctatgagggtttcttcagcctgtggaagggcttcacaccatactatgcccgactgggcccccacactgtcctcaccttcatcttcttggaacagatgaacaaggcctacaagcgtctcttcctcagtggctgag

SEQ ID NO: 1489 - DNA, 676 bp, Rattus norvegicus
ggcgccgcccgcggacagagcagggagtaacggggactgtggtcgcgggcagccccagccactcaccatgccctacctgctcatcagcactcagatccgtatggaagtgggtcccaccatggtgggtgatgagcactcggatccagagctgatgcagcagttgggggcctccaagagacgagtcctgggaaacaacttttatgaatactacgtcaatgaccctcctcgaatagtcctggacaagctggaatgcaggggcttccgagtgttaagcatgacaggggtgggccagacgctggtgtggtgtctgcacaaggaatgacctgcttgagctgacttgtgcgtagggtatatattctttggagggatcgccatgtgccctgtccataatcttgcatcactgtctcccctgtcgctctctttccaaattgtcaacttccttgcccaacactgatgggctgtgaacagcctcaggaaccttgctgcggttggttgggtacagcaggccctgccccggctccttcagcttcccccagctggacctggacctgcctcttgctgtaggccatgtgcagaaggcaagctaccctgaggatggtccctggatcctacacagctaatccaagccaataaagggctctcacaagtgttgttcctcaaaaaaaaaaaaaaaaaa

SEQ ID NO: 1490 - DNA, 1504 bp, Rattus norvegicus
gctgcgtggcgtcagggttctggagctggcaggcctggccccagggccgttctgcgggatgatcctggcggacttcggcgccgaggtggtgctcgtggacagactgggctccgtgaaccaccccagtcacctggcccgaggcaagcgctcgctggcgctggacctgaagcggtctccgggagccgcggtgttgcggcgcatgtgcgcacgcgcggacgtgttgctggagcccttccgttgcggtgtcatggagaaactccagcttgggccagagactctacggcaggacaatccaaagctcatctatgccaggctgagtggatttggccagtcgggaattttctccaaagtagctggccatgacatcaactatgtggctttgtcaggtgtcctgtcaaagattggcaggagcggtgagaacccataccctcccctgaacctcctggccgactttggtggcggtggcctcatgtgcacattgggcattttgctggctctcttcgaacgcacgcggtctggcctagggcaggtcattgatgcgaacatggtggaaggaacggcatacttaagtactttcctgtggaaaactcaggccatgggtctgtgggcacagcctcgagggcaaaacctgttagatggcggggcacctttctacacaacctacaagaccgcagatggggagttcatggctgtaggtgcaatagaaccccagttctacacactgctgcttaaaggacttggacttgagtctgaggaactccccagccagatgagcatagaagattggccagaaatgaagaagaaatttgcagatgtgtttgcaaggaagactaaggcagagtggtgccagatctttgacgggacagatgcatgtgtgaccccagtgctgactcttgaggaggccctccaccaccagcacaacagagaacggggctccttcatcactgatgaggagcagcatgcatgcccccgtcctgcaccccagctttccagaacccctgctgttccttctgccaaaagggacccttctgtgggagagcacactgtagaggtgcttaaagactatggattcagtcaggaagagatccatcagctgcactcggatagaatcattgaaagtaataagctaaaagccaacctctgactcaggttcacagctcaagtgaatctgaaggctgtatctgtactggagaaggatgcccaccactgtccgtatggaaatgtgaatgaacagtaatgaagtaatccaaatattccaatcaagacacaacgaaagactgattacagagaaatgactgtgctctcacactgctcatccgagcctctgattgaggagtatttttgtgtgtgtactgatattaacttgtggcagttttctgcctttcagcttacttggtgaagtgcattcactgattaaaacccttttgtaaatgcaactctgataatatattaaatgaactaatataactttaataaataaagcttttttttccttgaaaaaaaa

SEQ ID NO: 1491 - DNA, 4413 bp, Rattus norvegicus
  misc_feature (1)..(4404): n = a or c or g or t
ggcgtcttgttcctgtttcgccacagttcctaccttatgagcttggattcctcacgctaataaaagaggagcagtaaaagctggcaggctgacagaggcaacctcaggacggactttctggctactgaccattttgctgtgtcttactaggattgtgtgtggacgtgagatcaaccatgagctccgttgcagttttgacccaagagagttttgctgaacatcgaagtgggctggttccacaacaaatcatagttgccacattaaattcagaagaagaaagtgaccctccaacctacaaggatgccttccctccactgcctgagaaagcagcttgcttggaaagtgcccaagaacctgctggagcctggagtaacaagatccggcccatcaaggcctctgtcatcactcaggtgtttcatgtacccctggaggagagaaaatataaggacatgaaccagtttggagaaggtgaacaagcaaaaatctgccttgagatcatgcaaaggactggtgctcacctggagctctctctggctaaagaccaaggtctctccatcatggtctcagggaagctggatgcagtcatgaaagcccggaaagacattgttgctagactacagacacaggcctcagccactgttcccattcctaaagagcaccaccgctttgttattggcaaaaacggagaaaaactacaagacttagaactgaaaactgctaccaaaatccagatcccacgcccagatgaccccagtaatcagatcaagatcactggcaccaaagaaggnatcgagaaagctcgccatgaggtccttctgatctctgctgagcaggacaagcgtgccgtaaagaggctagaagtggagaaggccttccaccccttcatcgctgggccgtacaatagacttgtgggtgaaatcatgcaggaaacagggacgcgaatcaacatccctccacccagtgttaaccgtacagaaatcgtcttcactggagaaaaggaacagctggctcaggctgtggctcgtattaagaagatttatgaggaaaagaagaagaagactacgaccattgcggtagaggtgaagaaatctcaacacaagtatgtcatcgggccgaagggcaactcactgcaagagatcctggaacgtactggagtctccgttgagatcccgccctcagacagcatctccgagactgtgatacttagaggcgagcctgaaaagctgggacaggcattgactgaagtctatgccaaggccaacagttttacagtgtcctcagtctctgccccttcctggcttcaccgtttcatcattggtaagaaagggcagaacctggccaaaatcactcaccaaatgccaaaggttcacattgagttcacagaaggtgaggacaagatcaccctggagggccccacagaagatgtgaatgttgcccaggaacagattgaaggaatggtcaaagacctgattaatcggatggactatgtagaaatcaacattgaccataaattccacagacacctcattgggaagagtggagccaacatcaacagaatcaaagaccagtacaaagtgtctgtgcgcatcccccctgacagcgagaagagtaacctgatccgaattgagggagacccacaaggtgtgcaacaggccaagcgggagctgctggagcttgcttctcgcatggaaaatgagcgcaccaaggatctaatcattgagcaaagatttcatcgcacaatcattgggcagaaaggtgaacggattcgagaaattcgtgacaaattcccagaggtgatcatcaactttccggatccagcacaaaagagtgagattgttcaactcagaggccccaagaatgaggtggagaaatgtaccaagtacatgcagaaaatggttgcagatctggtggaaaatagctattcaatttctgtaccgatcttcaaacagtttcacaagaatatcattgggaaaggaggtgcaaacattaaaaagattcgtgaagagagcaacaccaagattgaccttcctgccgagaacagcaactcggagaccattgtcatcactggcaagcgagccaactgtgaagccgcccggagccggatcctgtccatccagaaagatctggccaacatagctgaggtggaggtctcaatccctgccaaactacacaactctctcattggcaccaagggtcgtctgatccgctccatcatggaggaatgtggtggcgtccatattcactttcctgtggaaggttctggtagtgacactgttgtcatcaggggtccttcctcagatgtggagaaggccaagaagcagcttctgcacctggctgaggagaagcaaaccaagagttttactgtggatatccgggccaagccagaataccacaaattcctcattggcaaagggggaggtaaaatccgcaaggtgcgcgacagtactggagcccgcattatatttccggctgctgaggataaggaccaggacctgataacaatcataggaaaggaagatgctgtccgtgaggcacaaaaggagctggaagcattgatccagaacctggataatgtggttgaagactacatgctggtggaccccagacaccaccgccattttgttatccgaagaggacaggtattacgagagattgctgaagaatatggcggggtgatggtcagcttcccacgctctggcacacagagtgacaaagtcactctcaagggtgccaaagactgtgtggaggcagccaagaagcgaattcaggaaatcattgaggatctggaagctcaagtaacgctggaatgtgctataccccagaagtttcatcgttcggtcatgggtcccaaaggttcaagaatccagcagatcactcgggactacaatgttcaaattaagttcccagacagagaggaaaacccagttcacagtgtagagccttccatccaggagaatggagatgaggctggagagggcagagaggccaaggagaccgacccgggatctcccaggaggtgtgacatcatagttatctctggccggaaagagaaatgtgaggctgccaaggaagccctggaggcactggttccagtcaccatcgaggtagaggtaccctttgatcttcaccgctacatcattgggcagaaaggaagtggaatccgcaagatgatggatgagtttgaggtgaatatacatgtgccagcccccgaactgcagtcacacaccattgccatcactggccttgcagcaaatttggacagggctaaggcggggctactggatcgagtaaaggagctgcaggctgagcaggaagatcgggctttaaggagttttaagctgagtgtcactgtagaccccaaataccatcccaaaattatcgggggaaaaggggcagtgatcacacagatccgattggaacatgatgtgaacatccaatttcctgataaggacgatgggaatcagccccaggaccaaatcaccatcacagggtatgagaagaacactgaagctgcccgtgatgctatcctgaaaattgtgggtgagcttgagcagatggtttctgaggatgttcccttggatcaccgtgtgcatgcccgaatcattggtgccagaggcaaagccatccggaaaatcatggatgagttcaaggtggacattcgcttcccacagagcggagctccagaccctaactgcgtcactgtgacaggactcccggagaatgtggaggaagctatcgaccatatcctcaacctagaagaggaatatctggctgatgtggtggacagtgaggcgctgcaagtttacatgaagcccccagcacatgaagagtccaaggcaccatccaaaggctttgtggtgcgagatgctccctggacctccaacagcagtgagaaggctcctgatatgagcagctctgaagaaattcccacctttggggctcaagtggcccccaagaccctcccgtggggccccaaacgataatgatcaaaaagaaactttccagcctgctgcccaaacccaaccacacaatggtttgtctcaatctgactcagcagctggaccctcgtaaattgttgatgctccccctccccgaagtctcgcagcaaagcctggtgggctggccttctgtggctgcttcccctggcctggtcagcacccgcaggctcagggtctgctcctgacgctgtgctctgggaaagtgcacgccactgcgtgaaacactaagcaaggtaatcgagcatttcgtgatcacagactccagcttcctggtccacccagcatgtagtcagcattctgactttcacagcagagttccacagcggctaggagttgacttccttgtgtcatgacctcaggaaataaatttccttgactttataaaagccaaaaaaaaaaaaaaaaaaaaaaaaaa

SEQ ID NO: 1492 - DNA, 1463 bp, Rattus norvegicus
cgcgcttgcctagtgaagctgcgaacgtgtgggaggctgcactcactcgaggtcctgagttgcgcggagctgcttctgctagggcgatcgcctccctgcaatcatgttcctgaggagcagcgtctcccgtctcctccacgggcaaattccttgtgccctgacgagatccgtccactctgtagctgtagtcggagcccctttctctcggggacagaaaaagaaaggagtggaatatggcccagccgccatccgagaagctggcttgctgaagaggctttctatgttgggatgccatataaaagactttggagacttgagttttactaacgttcccaaagatgatccctacaataatctggtcgtgtatcctcgctcagtgggcattgccaaccaggaactggctgaggtggttagtagagctgtgtcaggtggctacagctgtgtcacactgggaggagaccacagcctggcaatcggtaccattagtggccatgcccgacaccacccagatctctgtgtcatctgggttgatgctcatgctgacattaatacacccctcaccactgtatcaggaaatatccatgggcagcctctttcctttctcatcagagaactacaagacaaggtaccacaactgccaggattttcctggatcaaaccttgcctctctcccccaaatcttgtatacattggcttacgagatgtggagcctgccgaacactttattttaaagagttttgacatccagtatttctccatgagagatattgatcgacttggtatccagaaggtcatggaacagacatttgatcggctgattggcaagaggaagaggccgatccacctgagctttgacatagatgcatttgaccctaagctggctccagccacaggaacccctgtggtaggggggctgacctacagagaaggactgtacattactgaagaaatacatagcacagggttgctgtcggctctggatcttgttgaagtcaatcctcatttggccacttctgaggaagaggccaaggctacagccagcctagcagtggatgtgattgcttcaagttttggtcagacaagagaaggcggacacattgcctatgaccaccttcctactcctagttcaccacatgaatcagaaaaggaagaatgtgtgagaatttaggaaacactgtactctggcacctttcacgacagcattccagagttgggaggcatttaaagggacaaagagtaaatggctgtctggatccaatattgccttaatgagaacatctgtgcactctcacaagtgtagagtccccttctctattttggtcacaatactatcactgtaaatgtatctgttgggtttttgtttctgaagtttacaagctattgttattatacacgtgtgtttgaaggagtcataaacagcatttattaccttaaaaaaaaaaaaaaaaaaaaaaaaaaaaaaa

SEQ ID NO: 1493 - DNA, 2936 bp, Rattus norvegicus
gaattcggatccgcacccctcgggctgtgagtgttatctccgggcgccagccattctacctctgcctcattgttattctgtcctcccacaagctatgtcacaatcgggaaggacccttaagcacatagtccatctgcccagggccaagatgtcttcaacttgcaatttgcattgctgtggaatgtaaaccggtcccccacctggtatccttgagtgacccttcttggggccagcactcatctggctattcagcaggaaaacacacagaactactgcagactcccccagacctaaatcctctcttcaatactcttctagtcaccaggcccccaacaggaatcagtgtccacatctgccttcctctatcctctacaagaaggtgggggaccaaccagacttccacaacctagacacgaccctatgacacagggagagcatccccctgagtgtacaatacaaaatactcccatagaggaaataatgttgtaagaccagttggggagacatttcttccaggtctctcttcctcacttcctgaatccatttcactcctatcttgtagcctcaggataaggtgccagcctgcccttgagtaatccctagattcgtacaacctctgccggccaagttacacctgttgctgggtcaggcaggctcactctcaccctggcgagtgacacagaagtacagctagtgagtatagcttaccaatcatccctgtgagcaagctttccagggacgcttgtctaaactagcatttccccaaaaggtcttattaattagccagtggggcagaagccgggaatagcagcttttgaaacagtgttgcctcaggataaaagggcttgctagctggaaagttcacaacctgagtttgatctttagtacccctgttaatgtaggagagagccggctctacaaagctgtcctctgataatcacacacacacacacacacacacacacacacacacacacacacacacacacaccaacctggccatgggtgcccacacacaagtgcacacatgcatgcacacacacaataagtcctttttttttttttaaatcaacctacttttgtaattcttaagatgaagtctgtttgaaattgaggtcaaagataaatggatgaaaacagttcatttcatcttcatggggactcttagggaacattcattgttaagctctctgtaacttttttttttttttttttggagctggggaccgaacccagggccttgcgcttcctaggtaagcgctctaccactgagctaaatccccagccccaacttatttttttttacattgtgtgtgtgtgtgtgtctgtgtgtgtgtgtgtgtgtgtgtgtgtgtgtgtgtctgtgtgtgtgtgtgtacacgtgtgagctgtctggtcagagggcaacattcaggaatcaggtctctcatttcaccattgtgggttcagagcatagaactcaagtcactaggcttgatgactaagccttctccgggagtggggaattggggggggggaatcttcagatgcttttgtcgaaaggaatttatggcatctgggagtggagccgagaccacccccaaccctgctcttaagttccagcaggttagaagggaacacttgcttatacccactacctgagagcaaggaaggattttttttttttaaaccaagagacggggcattaccagctaaaccctaggattaaaatagatgagctgaactcttagttccaggtgagtggctgctagtcaggtgacacagctgctcccgtctccaggtgaagccacagtgtcccagtatcaggaggtctcatgtgctctgcctttcaaatctgtgtaagtcgctagggccaagcactcttcaaggtcaaacaccccacccagacaagtacctcacaaagccaagtactgcactgggggccagctgtgggaggacaggcaccccaccatccatgcatccacgtgccttggatgagggctcagttaattaacgcgagccgcctcagactcacacaaacaacggctgttttccttaaaccatcagattcaatatttacaaaaaaattaaaaagccaatgcgtcgtcctaaaaccataaaaccagccgcacaggccagtgtgtgagtctcccttctgcccagtaacaagaaaacctaagtcgtgtgccttgcccttcaaagcagaatagtaaagatagtagaaaaataaataaaaattgtaaaacagaactgtgtattgcatctgtcccccctaccccccttctcctgtagtggaacaaagtcaaacgctttttttttttttttttttttttttttggcctgggctgggcccccagtggctgaggccctgtaactttaaacctggcctgaggtcatcttgtgatgctggccaaacagaattcgggggcggtcctagatctccgggaccacctgacgcccacccgcccccgcccccgtactggagacttaaattgccgactgtgctgagaagttgccagttgccaagtttgctgtgcttgctccctccgctcgccttgaaagcccgggcactctctgtcgctgggactcttgctcaccgcttgccagcctcctcagagctcttctcggctgggcctgtggcttcgaagtttttttgttttttcatcttttcacaacccacaaaaaccactagctgctgaggctccaacgagatcaagatgtggaccgcgccagtgttgctctgggttttggggagcgtttggttctgggactcagcgcagggaggtaagcgccacgcctgattggcaaccccgcacttgctgatggggatggagggaggcgggggttgcttgggcctgggatctggaggtgccggggagagcggtggggcagcttagatggggcttagaagagtccccgggaacagcccagtgggtgtggcagtagaatcgggatcc

SEQ ID NO: 1494 - DNA, 2412 bp, Rattus norvegicus
agagctgttggtccaagatggcggctgccgcggggcctgtgggcgatggggagctgtggcagagctggcttcctaaccacgtcgtgttcttgcgactccgcgaaggtctgaaaaaccagagtccagccgaagcggataaaccagcgacttcgacttcaccttcatgcccgcctctgccgccgcatttgccgacgagaaacctggtcttcggcctcggaggggaactgttcctgtgggacgcagaaggcagtgcctttttggtggttcgccttcgaggccccagtggtggcagcgtggagccccctctctcccagtatcagagattactttgcattaatccacccttgtttgaaattcatcaagtcttgttaagtccaacacaacatcatgtagcacttataggaacaaaaggacttatggcattagaattacctcagagatgggggaaggattctgaatttgaaggtgggaaagcaactgtgaattgtagcaccatcccgattgctgagagatttttcaccagttctacctctctgactctgaagcatgctgcatggtatcccagtgagatgctggatccccacatagtgctgttgacgtcagacaatgtgataagaatttactctctgcgtgagcctcagacaccaactaaggtgattgtactttcggaagcagaagaggaaagtttaatactcaataaaggaagagcatacacagcatctctaggagagacggcagtggcgtttgacttcgggcctctggtgaccgtctcaaagaatatgtttgaacagaaagacagagaagcagtggcgtatccactgtacattctgtatgagaacggggagaccttcctcacctacgtcagcctgttacacagcccagggaatattgggaagctgttgggcccactgcctatgcatcctgcagctgaagataactatggttacgatgcctgtgctatactctgtttgccctgtgttcccaacatcttagtcattgcgactgagtcaggaatgctgtaccactgtgttgtactagagggagaagaagatgacgatcaaacgttagaaaaatcctgggatcccagggccgacctcatcccttctctgtacgtgtttgagtgtgttgagttagaacttgccctgaaactggcgtctgcagaggatgatccctttgcttctgacttttcctgtccaattaaactgcatagagatcccaagtgtccttcgagataccactgtagccatgaagctggcgtacacagcgttgggctgacttggattcacaaactgcacaaattccttggatcagatgaagaagacaaggatagtttacaggagctcactgctgagcagaaatgctttgtggagcacattctttgtacaaagccgttgccatgcaggcagccagctccaattcgaggattctggatcgtcccggatatcctggggcccacaatgatctgcatcaccagtacctatgaatgtctcataaggcctttattaagtacagtccacccagcatctcctcccctgctctgcacccgggaagatgctggagtggcagagtctccactgcgcatcctggcggaagccccagactcctttgagaagcatattaaacgaatcctgcagcgcagcgccgccaacccggcacttctcaagtcatctgagaaggacttggctccccctcccgaggagtgtcttcagctgatcagcagggccacccaggtgttccgagaacagtacatcctcaagcaggacctggccaaggaggagattcagcggagggtcaaattattatgtgaccagaagaggaagcaactagaagatctcaattactgtcgagaggagagaaaaagtctccgggaaatggccgagcgcttagctgacaaatatgaagaagccaaagaaaaacaagaagatatcatgaacaggatgaaaaaagtgcttcacagttttcacactcagctcccagtcctctcggacagtgagagagacatgaagaaagagctacagctgatacctgaccaacttcgacatctaggcaatgccatcaaacaggttactatgaaaaaagattatcaacagcgaaagatggaaaaagtgctgagtcctcagaaacccaccattactctcagtgcctaccagcgaaagtgcattcagtccatcctgaaagaagagggtgaacacatacgagaaatggtgaagcaaatcaatgatatccgaaatcatgtcaacttctgacaccacctgaagttaaggacagctgaaggcttacaagcccgtgctgcagaacaagcaggcagcataatctaatttataaagacgaatttggataaactatggtgtggttattcttttgttattccttttgttttataatacttgaataaatttttattcaaaattt

SEQ ID NO: 1495 - DNA, 2516 bp, Rattus norvegicus
cccgtcatgtctaacgaagtagaaacaagcacaaccaatggtcagcctgaccaacaggctgcaccgaaagcaccatcaaagaaggaaaagaagaaaggttctgaaaagacagatgagtatctgttggccaggttcaaaggtgatggtgtaaaatacaaggccaagctaatcggtattgatgatgtgcctgatgcgaggggagacaaaatgagtcaggattctatgatgaaactcaagggaatggcagcagctggtcgctctcagggacagcacaagcaaaggatctgggtcaacatttccctgtctggcataaaaattattgatgagaaaaccggggtaatagagcatgaacatccagtaaataagatttccttcattgctcgtgatgtgacagacaatagagcatttggttatgtgtgtggaggagaaggccagcatcaattttttgctataaaaacagggcaacaggctgaaccattagtcgtcgatcttaaagacctttttcaagttatctataatgtaaagaaaaaggaagaagaaaagaaaaaggttgaagaagccaacaaagcggaagagaatgggagtgaggccctaatgacccttgatgatcaagctaacaaactgaagctgggtgttgaccagatggatttgtttggggacatgtctacacctcctgacctaaataatccaacatcttcagcaaacgacctgcttgcttcagatatctttgcctcagaacctccaggccagatgtcccccacaggacaacctgcagtcccacaggcgaactttatggatctcttcaaaaccagtgctcctgccccaatggggtcggggcccctcgtaggtctaggtactgtcccagtaacacccccccaagcaggaccttggacacctgttgtcttcactccttctacaactgtggtcccaggagccataataagtggccagccttccggttttggtcagccactcgtctttggtacaaccccagcagtgcaagtttggaatcagccttcatcatttgcaactgcagcttcccctccacccccggcagtttggtgtcctaccacatctgtggcacccaacacttggtcatccacaagtcccctggggaatccttttcagagtagtaatatctttccaccttccaccatatccactcagtcctttcctcagcctatgatgtcctctgttctggtcacacctccccaaccacctccccgaaatggcccactaaaggacactcttagtgatgccttcactggcttagacccacttggggataaagaggtcaaggaagtgaaagaaatgtttaaggacttccagctgcggcagccacctcttgtaccctcgaggaagggggagacaccttcctctgggacctcaagcgccttctccagttacttcaacaataaagttggcattcctcaggagcatgtagaccatgatgattttgatgccaatcaactgttgaacaagattaatgaaccaccaaagccagcccccagacaaggtgtcctctcgggtaccaaatctgctgacaattcactcgagaaccctttctctaaagggttcagctcaacaaacccctccgtggtctctcagcctgcatcttctgatgcccacaggagcccttttggaaatccttttgcctaacttctttctgaagttgtaatgctgactgactatccagatgagcaaaaggctggctttggtcaaggattaagcagatagccagaaacgtgctgacctctgtccttgctccagctttgatgtattacctgttaccctacttgtctttgcctcatgtacttgtaaaaagcctttcactctctctaggctaaagctacactgaaacaatggctttacataaattaaactcctaagctctctagctccaatataaatgaagtagcttccctaccaaatccttgtctgtcgtgctcctagaaccttccagaatattctccgttttaccctcaatttgggaggtgtggccacctttacccttaatatcacactgccttgagtaaatgtccaaatccttgtagctctcaaggtcatttgtgattcctggtgtgcatcataaatctaaacattaatattaacattaataggaaagcaagacaccttgcttcccattcccactcagacaagtttttttatgataaaatgaaagcaagactaacttctcgaatccacccaaggaccatttcgagatggtctttctcagctaattgcatcatttaccaatcctactccaagtggtgtttacatttgacttgaaaaggagaaaggtctaactcaaaacataaggcattattcaaagctaataaaacaatttctccctggggccccacattgttttcattccagacactttgcagctgtttgaccctgatgatattatgccctacattttccttgaagattctgattttatttcatgtgattcttttttctcaataaagatgattattgtgtgcatttactaaacaaacaaaaaaaaaaaa

SEQ ID NO: 1496 - DNA, 1617 bp, Rattus norvegicus
gcgctgtaagaagcaacacctcctcctcgcctccgccatccacccggcagccgcgaagcagcaaccatgcgtgagtgtatctccatccacgtcggccaggctggtgtccagatcggcaatgcctgctgggagctctactgcctggaacatggcatccagcctgatggccagatgccaagcgacaagaccattgggggaggagatgactccttcaacaccttcttcagtgagacaggagctggcaagcacgtgccccgggcggtgttcgtagacctggaacccacagttattgatgaagttcgcactggcacctaccgccagctcttccacccagagcagctcatcacaggcaaggaagatgctgccaataactatgcccgtggccactacaccattggcaaggagatcattgaccttgtcttggacagaattcgcaagctggctgaccagtgcacgggtctccagggcttcttggttttccacagctttggtgggggaactggctctgggttcacctccctgctgatggagaggctctctgtcgactacggaaagaagtccaagctggagttctccatttacccagccccccaggtttccactgctgtggttgagccctacaattccatcctcaccacccacaccaccctggagcactctgattgtgccttcatggtagacaatgaggccatctatgacatctgtcgtagaaacctcgacattgagcgcccaacctacactaacttaaacaggttgataggtcaaattgtgtcttccatcactgcttccctcagatttgatggggccctgaatgttgatctgacagaattccagaccaacctggtgccctaccctcgcatccacttccctctggccacttatgcccctgtcatctctgctgagaaagcctaccatgaacagctttctgtagcagagatcaccaatgcctgctttgagccagccaaccagatggtgaaatgtgaccctcgccatggtaaatacatggcttgctgcctgctgtaccgtggtgatgtggtccccaaagatgtcaatgctgccattgccaccatcaagaccaagcgtaccatccagtttgtggactggtgccccactggcttcaaggttggcattaattaccagcctcccactgtggtccctggtggcgacctggccaaggtccagagagctgtgtgtatgctgagcaacaccacagccattgctgaggcctgggctcgcctggatcacaagtttgatctgatgtatgccaagcgtgcctttgtgcactggtacgtgggtgagggcatggaggagggagagttctctgaggcccgtgaggacatggctgccctagagaaggattatgaggaggttggtgtggattctgtggagggtgagggtgaggaagaaggagaggaatactaaattaaatgtcacaaggtgctgctttcacagggatgtttattctggtccaacatagaaagttgtgggctgatcagttaatttgtatgtggcaatgtgtgctttcatacagttactgactttaagtgtgaatgatttgtcagagacccgagccgtccacttcactgatgggttttaaataaaatactccctgtctta

SEQ ID NO: 1497 - DNA, 557 bp, Rattus norvegicus
ctgcagatccttaattcagtcttctcttacgcttggttttcaggccaactgtcaggcagcccaaggacagtatgttcacacgggctcgtcaggcgctgcttccacgcagtcactcttcacagcctcctacacctactagataccgtcacctaccagccagctccagttgtcctaaatattttggttggagacctcaaaggcttcagtcagccctgaaattagatcacatctgattgaacttttgaaaacaccacatactgcgaatcagctgttgaagtgcggagtatgagcacgtcacccagtagtctccgaacacctccagttccccgtgttccagaacatccatccaagagaaggaacgggctttacatggaaggtcagtcttccatgcatacagccactactgagcaaagcagctcggaagggaaggaggagaagggcattttaacaaacatacttaccgggggttggttagagaagaggcacagcagcagaaaaagaaataaaaagtctatgaaccttcagttggtactgtttcactgctctgctctgctcga

SEQ ID NO: 1498 - DNA, 735 bp, Rattus norvegicus
acgcagctttgagtccacacctctgtctacgcagcagctatgccgccgtacaccattgtgtacttcccagttcgagggcgctgtgaggccacgcgcatgctgctggctgaccagggccagagctggaaggaggaggtggttaccatagatgtctggcttcaaggctcgctcaagtccacttgtctgtatgggcagctccccaagtttgaagatggagacctcaccctttaccaatctaatgccatcttgaggcacctgggtcgctctttagggctttatgggaaagaccagaaggaggctgccttggtggatatggtgaatgatggggtggaggaccttcgatgcaaatatggtaccctcatctacactaactatgagaatggtaaggatgactatgtgaaggccctgcctgggcatctgaaaccttttgagaccctgctgtcccagaaccagggaggcaaagctttcattgtgggtaaccagatttcctttgcagattacaacttgctggacctgctgctggtccaccaagtcctggcccctggctgcctggacaacttccccctgctctctgcctatgtggctcgcctcagtgcccgccccaagatcaaggcctttctgtcctcccctgaccatttgaaccgtcccatcaacggcaatggtaaacagtagtggacgaagggacaggaactccttgtcccccttttcccagactaataaagtttgtaaggcaga

SEQ ID NO: 1499 - DNA, 1846 bp, Rattus norvegicus
gttggtgtggccgatggactttagtcactggatgaatataaaaataatccttgatgaacttgtacagaggggccatgaggtcactgttctgaaaccttcggcttacttttttcttgatccgaaaaaatcgtctgaccttaagtttgaaattttttctacatctatcagtaaagatgagctgcaaaatcatttcataaaacttttggatgtgtggacttatgagttgccaagagatacatgtttgtcatattctcctatccttcaaaatctagtttatgaattttcttatttttatctaagtatttgtaaagacgctgtttcaaacaagcagctcatgacaaaactacaggaatccaagtttgatgttcttttcgcagatcctgtggcttcctgtggggagctgatagctgaactgctccacattccttttctgtacagtcttagcttctctccaggccacaaacttgaaaagtccattggaaaatttatactccctccatcttatgtgcctgtaattttgtcgggactggctggcaaaatgacattcatagacagggtaaaaaatatgatatgtatgctttatttcgacttttggttcgagagacttagacacaaggaatgggacacgttttacagtgagattttgggaaggcccaccaccgtagatgagacaatgagcaaagtagaaatatggcttattagatcctattgggatttgaaatttccccacccaacattaccaaatgttgactatattggaggactccattgcaaaccttctaaacccttgcctaaggatatggaagaatttgtccagagctctggagagcacggtgtggtggtgttttctctggggtcaatggtcagcaacatgacagaagaaaaggccaacgcaattgcatgggcccttgcccagattccacaaaaggttctttggaaatttgatggcaaaaccccagcaacattaggacccattaccagagtctacaagtggctcccgcagaatgacatcctgggtcacccaaaaaccaaagcctttgtaactcatggtggagccaatggcctctatgaggcaatctatcatggaatccctatgattggcattcctctgtttggagatcaacctgataatattgcccacatggtggccaaaggagcagctgtttcattgaatatcaggacaatgtcaaagttagattttctcagtgcactggaggaagtcatagacaatccgttctataaaaaaaatgttatgttgttgtcaaccattcaccatgaccagcctatgaagcccctggacagagctgtcttctggattgagtttatcatgcgccacaaaggggccaagcacctgagaccacttggacataaccttccctggtaccagtaccactctctggatgtgattggattcctgctcacctgttttgcagtcattgcagctcttactgtaaaatgtctcttgttcatgtaccgattctttgtaaagaaggaaaagaaaatgaagaatgagtagagctcattgacaatgcactaactgaaatgaaatttcagcgtcattctaatttatgaaccaccttctaaaaattactaattttttatcaaggtagataacctttgtaggaagacatataactccgtgaatactgatatgtactcaaaaatccatcatttttaaattttaaaaccacttaatgtaaaagttacattgtagaaaaatgtgcagaataaaattattcttgatagagtccaaataatcaagtattaaccttaaaatatttgaatagtgccattagcttctttgtctaactgtagctttcatacaataaaatgtagataacttgta

SEQ ID NO: 1500 - DNA, 1834 bp, Rattus norvegicus
cggtttctggtgctgggcctggtggcggtggttctggtgttcgtcatcatcggcctctgcatctggctacccaccacctctgggaagcctgaccatgtgtactccagggcggccgtggccacagatgccaagcgttgctcagagattgggcgggatatgctacaggaaggcggctccgtagtggacgggccatcgcaagcctgctgtgtatggggctcattaatgcccacagtatgggcatcgggggcggcctcttcttcaccatctacaacagcaccacacgaaaagctgaagttatcaatgcccgtgaaatggctcccaggttggccaataccagcatgttcaataattctaaggactctgaagaaggaggcctttcagtggcagttccttggtgaaatccgtggctatgagctggcacaccaacggcatggccggctaccctgggctcgcctcttccaacccagcatccaactggctcgccatggcttccctgtgggcaagggcttggcaagagccttggacaaaaaacgggacatcattgagaagacacctgctttgtgcgaggtgttctgccggcaagggaaggtgcttcaggaaggagagacagtaactatgccgaagttggccgatacgttgcaaatactggcccaggaaggggccagggccttctacaatgggagcctcacagcccagattgtgaaagacatccaggaggctgggggcattatgacggttgaggaccttaacaactatcgtgcggaagtgatcgagcatccgatgagcatcggcctcggggactccaccctgtacgtgcccagcgccccactcagcgggcccgtgctgattctcatcttgaacatcctcaaaggatacaacttctctccaaagagcgtggcaaccccagaacagaaggcgctgacgtatcaccgtatcgtggaggcctttcggtttgcctatgccaagaggaccatgctcggtgacccaaagtttgtcgatgtgtctcaggtcatccgcaacatgagttctgagttctacgctactcagcttcgagcccgcatcactgatgaaaccactcacccaaccgcctactatgaggctgaattctaccttccagacgatgggggtaccgctcacctgtccgtggtttccgaggatggcagtgctgtggccgccaccatgaccatcaacctctactttggctccaaggtcctctctcgggtcagtggcatccttgttaatgacgagatggatgacttcagctcgcccaacttcaccaaccagtttggggtagcgccctcaccagccaacttcatcaagccaggtaagcaaccgctttcatccatgtgcccctcaatcatcgtggataaggacggcaaggttcggatggtggttggagcctcgggaggtacccagatcaccacgtctgttgcactggccatcatcaacagcctgtggttcgggtatgatgtgaagagagctgtggaggagccccgtcttcacaaccagcttttgcccaataccacaacagtagagaaaaatattgatcaggtggtgactgcaggtctgaagactcggcaccaccatacagaggtcacacccgacttcatcgctgtggttcaggccgtcgttcgaacgtcaggtggttgggcagctgcctcagattccagaaaaggcggggagcccgctggctactgagtgcccggaaggggcaagactgacctcagccaagagacgagagtgggactctggagaacatgctgcccctgggtgggagagagcaggataataaacagaggccgccgccaagttgcgggaagcctttgcaggctgg

SEQ ID NO: 1501 - DNA, 1121 bp, Rattus norvegicus
aagatgaactctcaatcctaaatatctatgccccaaatacaagggcacctacatacgtaaaagaaaccttactaaagctcaaagcacacattgcacctcacacaataataatgggagatttcaacacaccactctcatcaatggacagatcatggaaacagatattaagcaatgatgtcgacagactaagagaagccatgagccaaatgggcttaacggatatttatagaacattctatcctaaagcaaaaggatataccttcttctcagctcctcatggtactttctccaaaattgaccatataattggtcaaaaaacgggcctcaacaggtacagaaagatagaaataatcccatgcgtgctatcggaccaccacggcctaaaactggtcttcaataacaataagggaagaatgcccacatagacgtggaaattgaacaatgctatactcaatgataacctggtcaaggaagaaataaagaaagaaattaaaaactttttagaatttaatgaaaatgaagatacaacatacccaaacttatgggacacaatgaaagctgtgctaagaggaaaactcatagcgctgagtgcctgcagaaagaaacaggaaagagcatatgtcagcagcttgacagcacacctaaaagctctagaacaaaaagaagcaaatacacccaggaggagtagaaggcaggaaataatcaaactcagagctgaaataaaccaagtagaaacaaaaagtaccatagaaagaatcaacagaaccaaaagttggttctttgagaaaatcaacaagatagataaacccttagccacactaacgagaggacacagagagtgcgtccaaattaacaaaatcagaaatgaaaagggagacataactacagattcagaggaaattcaaaaaatcatcagatcttactataaaaacctatattcaaaaaaacttgaaaattttcaggaaatggacaatttcctagacagataccaggtattgaagttaaatcaggaacagataaaccagttaaacaaccccataactcctaaggaaatagaagcagtcattaaaggtctcccaaccaaaaagagcccaggtccagacgggtttagtgcagaattc

SEQ ID NO: 1502 - DNA, 927 bp, Rattus norvegicus
gcggcggcaaagcttcgcagagacgctcactcttggttctcgcggctgagcagggatttaaccgccaccatgtcgagcaaaagagcgaagaccaagaccaccaagaagcgccctcagcgcgcaacgtccaacgtgttcgccatgtttgaccagtcccagatccaggagttcaaagaggccttcaacatgatcgaccagaaccgggacggcttcatcgacaaggaggacctgcacgatatgctggcttcaatgggaaaaaatccaactgatgaatacctggacgccatgatgaatgaggccccgggccccatcaatttcaccatgttcctcaccatgtttggagaaaagctgaacggcaccgaccctgaggacgtcatcagaaatgccttcgcttgcttcgatgaggaagcaatcggcaccatccaggaggattacctgagggagctgctcaccaccatgggcgaccgcttcacagatgaggaagtggatgagctgtacagggaggcccccatcgacaaaaaggggaatttcaactacatcgagttcacgcgcatcctcaagcacggagcgaaagacaaagatgactgaagagctgtggcttccagccaaatgtccctgttgccattgggtatttctgagattttcctcctggagcggtcggctgcccttgcttttctgccttttgcttcccttgttttgtatttattctcagccactttgggccacgtgtaccttcatcatcagactggaaacgggactttctgtcattgttcgatgagaacgtaaggtaatttaacttacagacagtcttgtcccttgtaataactgcagccacagagtcagtatattttttcagagaaagttatccactcaattttttctgaatgataattaaactttctgataaaataaaaaaaaaaaaaaaaa

SEQ ID NO: 1503 - DNA, 13011 bp, Rattus norvegicus
gaattccagggcatcagccaaggataaccccagtgagctcattaccccaaaaagttgggcatcagggtagttccaagaatctggatagagagtgtcctctggtaggagcatgtgctcagcttactcctcacccagtctcccacgggtgctattccccactgaccaaactctgtggaagccctgggacaaagcctttggctccttgccccaaatcagagaagaaggggccagagacagggtctggagtgaccccagatgcatggcacactctcctcaactccctggggcctcctgtcaggacaggaaagcaaaagcatgcccagctgtcagtcctggattttaatgattaactggcacttcaaacacagcctgtgccaaacaggagtcttggattccaccatcttttttctttctttcttttctttctttcttttttttttttgatatttttatttacatttcaaatgttattcccttccccggtttccctttctatgaggatgttccccctccccaaccaccccccattcctgcctctctctctctctctctctctctctcacacacacacacacacacacacacacacacacacacacactcctctgtactgggggtggggtgtgggtgtccagccttggcaggaccaagggcttcccattggtgcccaacaaagctgtcctctgctacatatgcagctgaagccatgggtctgtccatgtgtactctttgggtagtggtttagtccctggagctctggttggttggcattgttgttcatatggggtctcaagccccttcagctccttcaatcctttctctaaagggttccaccatcttaaccctacttccacacttacctcagtgaacaacagacacttctcccctcccgcctgcttgggttatatcagggccccttgaaaagccctctgtgccttttctccctacagctcctccctaattctttggctcaagagaaggcccaccttgacctggttggcctttgtgactattgtgggaggtcagaatccactggagacctcacccagtccgaagccttatgtctcacctccccaggaaagccctttgctcccctatcccaggaatacagggtgttagctatcacatcttcaaaggttggcttcagagaaagatgacttcctcctgcttgcagtacctcagcactggcagatggatgggacatttgaccccagagcaaaaccagacttctccatgttgtactccaagcactgaaagcctcccttaccagtacagctcctcattccactctgccttcccttttccaaaacacatctcacagacttctccctccccacagtgccacccaggctagcctgtcacctcccaccctgagcaactcccaagactcacctgtgtctccctaatccaccactgactccaccactgactccagccagagcaaccgtaaactttacttgaattatgtccctggcagcaatgccagttgccgctcagtgcccagctttaccatggccacgttctccctcccagcttcttctacacggaaaggtttttcttcctcagagttgtgggatatatttaacctgcagaggaatgtgtgtgtgtgtgtgtgtgtgtgtgtgtgtgtgtgtgtgtgtgtgtgtttcctctgcccctgctggtcccctctcatctttaatagtgtaggcagaatcacatcaaagagagccgcatcttcattaggaggtacctaagacacatcactgcaacgcccggcccctctacccagtaccgagatccatccctgacagcccctgccctgtttatagcatttatttatttgctagtagtctgtcccccacccctgctatactataatccacagacgggaaagtttccatctgcctgactcccactgtatcctcaaggtctgtcactggccggtgtcatagtgagaatgccacggaaggcctcccagagaacccccctgttttatcaactttgcggaacatgcaaaaccacctaagactggagtcaggaggatccccagagtagggccttctgggattcaagagagcagtaagtgccaggtggtccccttggtagtgataggggattctgcctgcaggactgcagtttaccatcatggtggtcaacaaggcaaggtcattctccctggtgctatggtatgatctccctggtgagatcgatgcccttgtgatggctgaggagatcccctgtactcaggtttccatgtgtttatccatacggctggtcaacaacaatacaagtttatgagttagtgcctaggaatgttcatggtttcatctctgggttctcagaggaacatgtgcgagaaactgagagaccctctaacctttaactaccaaagggtatccctgttttccacagcctagtccccaccttcaagctcttgttctgagaatacacctaagattctcttcaataaaatgcaaagagaaaggcattgtactgttggcaatcaaccaatctcttctctaatgatgagccaacaatgtgaatggactaatgattgatcaggaaaaaatagatgacctaggggaaggggagagatgggggccccacaacaggcagtccttgagaagggactctgtggggatggggctgcctgctgggtgtgccccttttctattctctggcttcctcagataagaccagcagttagggtacactctcctcccagtctgccgttcttgcagacacagttccacgctttggaagcatgtctgtccaggagaacactctaccccagcagctctggccgtggatctttaggtcccaaaaagacttggcaaagtctgccttaagtggggctcccggaggtaagaagaggaagggaagccactgaagagagaggagaattagggtagaatcagcgttgagagatggaggccttgtggggtaggatgcccaatatagcctcacctcggctaaatacagacctgatctgagcctttgatccaggctctgcagacaggccaaaggggatccagcagcatgggcgcacggggcactcccgtggttcctggactctggcccccagtgtacaaggcttccgttggcaagagagatgctagctggttatactttaaccaggactcatctcatctgagccaggccccatcccactgacaaaggcgcagtataaagcagacccacagacacagcaggtaagcaacgtagcagcatggaaggtgcttctaaaccgggtgctctactgagcagggctgggtcaagctacggatccagcgcagccttgaatgggtggagggaaggtggaggggaggggagtggagaaggccagagaattgcctggagctggaagaagtaaacaagaaaatgagggaaagtaagctgagtgtttgcaggcctagataatgaggtgcaggcttgaaggaggcctctgggagggctgaagctgagtggtctgcagcggtgtgacgcttggggaaggtctctgtagcttggggatagacctggatttgaatcatctcacttggctgatgcattttttttttcttagacaatgtatttttttttccccttggtctttttcttacttgtaaagtggggatagagcaggaccctggagactaaacaaagtagcgggtgtgtgatagtcaaatgggaggaagacctcgcaccatctggagatctgaatagacacagggtgcactggcaggaagcacatgggggacaggcaggtgtctgtgcaagagcctgagtttccatctacggcagggccagcgggataccttcgacgtgcgagtgtggctcaactgacccaggagctgggcactgccttcttccagcagcagcaactgccggcagctatggcggacaccttcctggaacacctctgccttctggatatcgactcacagcctgtggctgctcgtagcaccagcatcattgccaccattggtaagaccacccaagccctagaagccacacagggccacccacatggctcaggtgtctccttactttgctatccttgttgtggtcattcattcaacaaatatttgtgagatttgtgcaggggtagggggtgggtttgtttttgtttttgtttttgtttttttgagatcgggtctttttatgttgtagctctgactgatggataggcaggtctcaaatttagaaatctccctacctttgcctcctgagagttggactgggaccaccttgctccacatgaggctgggtttttgagacagggtctcaggtagccttggatatttctagcttatttcatagaccctattatatcgtcttagcctggtgaaagcataggtatgtgataccacacccaacttaacaaatgcttgttgagtacctggaaaacaaggtttggaattggggggtagactctatctcaaaaacaaataagaacgaggaaaggtgtcatctgcacacagatggccttccaaggataaggacggctgggatcacagagaagtgaaaggtatatataatgaactgaggaccagacagacacacacctaatacacacatgtcacacaacatacacacacaccacacacatacacatgcaccacacacatacacacacacaccacacatatactacatacccacacacacaccactcacatatcacacacatgtaccacacatacacacatcttgcacacacacacacaccacacacatatcactcacacatcacatacatataccacatatacacacagcacacacatacaccgtatatgcaccatatcacatacacacacaccattcacacgtcacacacacacatgcactatacacacacaccacacataacactactcacacatgacacacatatactacacatacacaaatcactcacacataccattcatacacatacatcatacacacataccacacaccactcacatatacaccacacacacaaacatgtacaggccacacacacacacacacacacacacacacacacacacacacacacaccagtcctcacacattatggctcagcatgctcagcagataaagtcttgtcatggagctgggtgacctgagttcaatccctgaaaccacatggaggattcggccacacacaccaaaaacaaaaacagaactcagtccagccaggctatgaggccctgtttcaaggagagagggtgggcagtagctctgttgttagaacacttgcctcctgcatgaagccctgggtccgtcctagcgctacataaattggctgtcgtagagtacacccttaacccagcacaggggaggacaggagaaccaagcccaaggttatccccagaagccagagcaaacccaaggctagcctgggttatgggagtccttgtctcagaaggaaggactgttattcctaaagaatgggagataaggatgggtgtagctcagtactatagcatttatttgcctcgcatgtagaaggccctggcctccatctccagagcagaaaaaaaaaatggtggccagggaagaagagggagggggaagtgcatacagcgagctgctgctgctgctgcaggctgacgtggatgaagacagggacagatctcagttctgtcagtgagattgctcagctttcaaagtgcctttttgacctgcctggcgttctgacccttcacagcctacagtaacctccacagcatacacttatgtcaggtcacttgctaacaaaggtcctgaggcctgactgagatttagacattccacaagctgccttcccaagggctgtgtactggttggagtgggggaaaaaaagagtttgtgagtagaggaacttcgaaggactcctgggtaggggagtctctccgatgttgcagatgggtttgactgtcaggcttgggaggaccttcttagtgggttctctggttccagggccagcatcccgctctgtggaccgcctcaaggagatgatcaaagcagggatgaacattgcacgactcaacttctcccatggctcccatgaggtgtggggaagaagtcatggagggtggagctgagaatgcccccaaggtcctgttcactttgccttaagatccaggttttgttctctctctctctctctctctctctctctctctctctctctctctcgctttctctctggtagtaccatgcagaatccatcgccaacatccgggaggcaactgagagttttgcaacctccccactcagctacagacctgtggccatcgccctggacaccaagggacctgagatacgaaccggagtcttgcagggggtgagaagcctttgggtccgagctgtctggggcctggaggagcatgagagccctggagcaagagagagggtccctaccctctcagggtccacttgcaaaactcaggcttctctacccaccccactcccctccagggtccggagtcggaggtggaaattgtgaagggctcacaggtgctggtgacggtggacccgaagttccagacaaggggtgatgcaaagacagtgtgggtggactaccacaatatcacccgggtcgttgcagtggggggccgcatctacattgacgacgggctcatctccttagtggtacagaaaatcggtacagaaatgcatcctgatcttatgaggcgctcccaaaaccctgaaacagggcattttctcttccctttggtttctatgttctgtcagctccttacccataccttcccctagtggtgcttgcttctccacctgtcctagtggtccctgctgtcatcatgggttggagctgagcatttgatgcctcttcttgtgtgtggagtgagtgaagggttcagaagattccaatttctggaggatccaagcttaagagttccctctgcagtgcctatatcgcagctcagccttacagacactggttctctctatacccgcaggcccagagggactggtgacagaagtggagcacggtggtatcttgggcagcaggaagggtgtgaacttgccaaacactgaggtggacctgcccgggctgtctgagcaagaccttttggatctgcgcttcggggtgcagcataatgtggacatcatctttgcctcctttgtgcggaaagccagtgacgtgttagcagtccgggatgccctggggccagaaggacagaacatcaaaattatcagcaaaatcgagaaccatgaaggcgtgaagaagtgaggcttagtctttggtccgtcagccctctgtttctctttccctctcttctgcatgatatttcctgccatctcctcctctgcctagcctggattcctccaaccaccaggtttgatgaaattctagaagtgagcgatggcatcatggtggcacggggtgacctgggcattgagatccctgcggagaaggttttcttggctcagaagatgatgattggacgctgcaacctggccggcaagcctgtcgtttgtgccacacaggtctggagcaaacccttgggctttaaaggtgctgagaaacctacatgttgctgtctggtgcctggtcacaaaagacgatgacatgaacttccagggtcttactgtgaccctggcactctaagcgtgcaggtgccagagaaatagcgtgggcgggttcgggtccccagtcagaatgtgacttctacagctttgacatccatggtgtcactcagatgctggagagcatgatcactaaggctcgaccaactcgggcggagacaagcgatgtggccaatgccgtgctggatggggctgactgtatcatgctgtccggagagaccgccaagggcagttttcctgtggaagctgtaatgatgcaacatgcggtaggtactccgttctgaaaagctgctgggccagcgacacagacccctctggaaccccgttgactactcaacctgacctactggtccctgcagattgcgcgggaggcagaggccgctgtgtaccaccgccagttgtttgaggagctacgccgggcagcgccgctgagccgtgacccaactgaggtcactgcgattggagccgtggaggcttccttcaagtgctgtgcagcagccatcatcgtgctgacgaagactggccggtgagaaacatattggaaacagggctttgggcaggggcggctgacacagaggctaataaaaaaagcactgctttagggcaagcaaagaaacagccatggatgctagaggccaggagaggctagaggcttggacaggtggctttttgatgatctagaatcagagccagtgatgggggggggggggcgcacggggacggggacgcagcaggtgataacccaagcacgttggccttagggtatttgaagaccaggctctgacagatcttcactgtgctgaggtgttgctgaaaaacccagtaggcccaagagctgaggatttttctcaaacttagtagtgagatcctaagtaattgttagggcttacaagccttgactccatggatctgtgtgagtttttcatttgtccccaccccaccccacccccatggggttgtgaggattaacaaaaaatggttaagagtcatatggaggttgggaatgatgtaaacatatcttctagacagttttaccctttttttgttgtttgtttggtaggatttttctgacatagggacttattagtcctggctggcctgaaacttccttagtacctgaagtagccttgaacttaaccctttaccccgagggctgaggttgtgggcgtgtctcaccacgcctggctggctttacatttctaattttttggaggatttattacttttatgtgtgcatgtacagttctaaggcgagaagaggttggaccctctggagctggagttacaggcagttgtaagggatttgatgtgggtgctcagaaccaactctggtcctcagaaagagcagtgcgagcctttaagaactgagccatctctctagcccaggttttacatttatctttcaatatggattgacattttgcctgcccttacgtctgagcaccatttgcatgtctggtgccagtgaaggccagaagaggatgttagagcccctgaaactggacttaaaaaccattgttagccaccatgctggtgttgaaaacgtaatcccagcgtgtgctcttaatggtgagccgtctctacatcagggtaggtcttcttactacttaatgagaaagacaaagatcagaggagtataccttacccaaggacacagggtttgttagtgacagtgacacctggaaccataattcaaactcgtttcttgggtcaacactcagagctaaccttttcttcctcatgcagttcagcccagcttctatctcaataccgacctcgggcggctgtcattgctgtgactcgatctgcccaggctgcccgacaggtccacctgtcccgaggagtcttccccttgctctaccgtgagcctccagaggccatctgggcagatgatgtggatcgaagggtccaatttggcattgaaagtggtgagccttgccctctgttccacagcctgccttcttaccccgactccaaagctctgtctgtcctcactggcccaagttttctaggaatcgctaagatggacatgtcttgggctttatttttgtttttttgtttgtttgttttttgttttttttttaaagatttattcatttattatatataagtacactgtagctgtcttcagacacaccagaagagggcatcagattctgttacagatggttgtgagccaccatgtggttgctgggatttgaactcaggacctctggaagaacagtcagtgctcttatccgctgagccatctctccagcccatgtcttgagctttaaagcaggaagggtaggctgagaggaaaggagtgagagcaggacccctgagaagtccttgctgctgtctgccacagcctagtaggacacatcagtaagaggaggttccagaagagctggaactaaattttaatttatagttgtccttgtcccattagtgcagccacatgggtgaaaaggctcaatgctgaaaaacagtatacagcatccctccacacacacatcctctcaaaccactgcctttggttcctttcccctacaggataggtagccttgaggtggtcgatgctaatggctgacccaggttcttcaatgactgtcatatttttctccaccaggaaagctccgtggtttcctccgtgtgggtgatctggtgattgtggtgacaggttggcggcctggctctggctataccaacatcatgcgggtgctgagcgtatcctgaaatgcctctccccattctgacccagttacaccctatttctttcaacccacacccctcccatagtcctacatctgccatctagccccatccctgtgctttacacagccctgaatgtctgtgtccaattatacagtggccaccggcagcatcggttgtatatccctgtctcaatccgctcagctggactctaagataccctgagcctttaatcccagcccagctggtgattcgattccttccgggtcccaatcattggaatgggggagtggaaacagggtgatcttgtccaattttcatacaatcatgattttaaaacactgtctgatataaccctcatgatcagttcctagcaaagtgtcatctcctaatggcctcaagtcagggcagaatactccttcaaggagcacagctccacactttagggaaggctggggcagctgggtactggagagaactaagacaggcggcttttctctctctctctctctctttttttttttcttttctttttctttttttcggagctggggaccgaacccagggccttgtgcttgctaggcaagcgctctaccactgagctaaatcccaaccccagcttttctctttttaatacaagctctcactggcctcaaactcctaagtcctcctgcctggccctcctaagggtagggactacaggcatgagtgaccagctggacttcgggtgccttattttcttactgactccacaaaccatggttgttctcctgcccactgctctgctgggtcagatgatccagaaattcttccacaaccacttggctcccacatacaaattagaagcaaactgaatcttttcttttaaacccaactgtttaggtgcaattataaaaacaactcccacaggcaaagaatcccagaatctcctaccctaggagatgtatagtcctggccccacccatcaatctgtagtatactcctgaagcgggacagaactggtggacaggggactcctcttgtccctaagaaagtggaggcactgttggcccacccctcctaggtttgaatactccaggccctcctcttagcaccaacagcaaatccagatgaggaaaaaaaaataagtgcagttctcctgctgccctcctcttttcactacctcaatacagcaagtttgagtattgctgctgatggcagtgtgcaaggccacaaagatgtcccccctcagccccctaccagaaggtggagaggacagaggaatgaataataaagtgaatgcgtcaaattagcaaatgaataaataaaattaataagtgactgaataagacacagggaaagataaaaggtcacatgaggattcagccccttaccccctacctgggggagctaggctagcacagtaaggaggcgccaagtatcccttagctttagggcaacaccattgagtcagggagcacagtgaagagcagcttctagtttacaaaggtagtgctttccacacaggagctgcggagggcagactacagtgggcagagatacccgttctcacgtggtgtagacaaggacggtccgtccacacgtggcagtgagagggaagatggtcacacctagggccctagacatctgttggctgtactagataattgacagtacccagctacgacaatggggatgggaagaaaggacacactgggcacaacctgcagggtcactgacagggagacagccatctagtcactcggcagtgaaggaagcagcaagtacttgtgcttaataaaggcagggctgtgggcccaagcctgcacctggcaggactgtggcctggggacaccttgttaaagggctttgagtcacttctacttggcagtggctacacattgtacttagcacaatgccttgacggggtaggcactggtacctatgacaaatgggtatgtgattaggattcgcaggctgcagctgctatgagctgaggacacagaggacaactttgtggtagtaaagggcagtgtgttagatccccgcagccttccccaggggcgtctaccctcaggcacaccttattgcgtgccaatagctaaggccagtgcaatctaggatttcacatgttggcagaaatttggggacctctgggggtaactggctcaggcactgatgacctggatggctggacagtccctggaggcttggccaggagccccaagggcagcacgctcacttccagagcctttgcgcctaggagagccatcccccgtggctcgctgaggcagagagggttgagaggcagagagtgggcggcccctaggtcctagcctccgaccacctcctcctggggagggcccaacagagacacctgggaacgccctgtccgggataggctggcatggagggttcgggcaggtggagggggagggcccaacagagacaccttgggaacccctgtccgggataggctggcatggagggttcgggcaggtggagcaggcaggcgagaagtggacgcccagggtccccgggccagcagaggacctgctcggacaggcaccagtggggaggctggggagcctgctgagcgtctagcagatcgagccaggagggtggctggagaatcaggggagaggggcagagggcctcgctgatgagtcaaggctatggccacgttggaggtcacagcagctgcctgcagaggtgcgtgtaccagtggttcccacagcactggctttccactgaggcgagctcctgtgcccggagccagaccccgaa

SEQ ID NO: 1504 - DNA, 988 bp, Rattus norvegicus
caggatggtggacagcgtgtaccgtacccgctccctgggggtggcggccgaagggatccccgaccagtatgcggatggggaggccgcacgtgtgtggcagctgtacatcggggacacccgcagccgtactgcagagtacaaggcgtggttgcttgggctgctgcgccagcacgggtgccaccgggtgctggacgtggcctgtggcacaggagtggactcgattatgctggtggaagagggctttagcgtcacgagtgtggatgccagcgacaagatgctgaaatacgcactgaaggagcgctggaaccggaggaaggagccagcctttgacaagtgggtcattgaagaagccaactggttgactctggacaaagatgtgccagcaggagatggctttgacgctgtcatctgccttgggaacagttttgctcacctgccggacagcaaaggtgaccagagtgagcaccggctggcgctaaagaacatcgcaagcatggtgcggcccgggggcctgctggtcatcgaccaccgcaactacgactacatcctcagcacgggctgtgcacccccagggaagaacatctactataagagtgacctgaccaaggacattacgacgtcagtgctgacagtaaacaacaaagcccacatggtaaccctggactacacagtgcaggtgccaggtgctggcagagatggcgctcctggcttcagtaagtttcggctctcttactacccacactgtttggcgtctttcacggagttggtccaagaagcctttgggggcaggtgccagcacagcgtcctgggtgacttcaagccttacaggcccggccaggcctacgttccctgctacttcatccacgtgctcaagaagacaggctgagcctggctccggctcccaccctaagaccatcgcctaccacagatattgcagagatgtggggggcaggcaaacagggagtcgacaatacagccttcccttgcc

SEQ ID NO: 1505 - DNA, 696 bp, Rattus norvegicus
ctctttccagccagcgccgagcgatgggcatctctcgggacaactggcacaagcgccgcaagaccgggggtaagagaaaaccctaccacaagaagcggaagtatgagctgggacggccggccgccaacactaagattggccctcgccgcatacatacagtccgagttcgaggaggcaataagaagtatcgtgctctgagattggatgtggggaacttttcctggggctcagagtgttgtactcgcaaaacaaggatcattgatgttgtctacaatgcatccaataacgagcttgtccgcaccaagaccctggtgaagaactgcattgtgcttattgacagcacaccgtaccgacagtggtacgagtcccactatgcactgcccctgggccgcaagaagggggccaagctgactcctgaggaggaagagattttaaacaaaaaacgatcaaagaaaattcagaagaaatatgatgaaaggaaaaagaatgccaaaatcagcagtcttctggaggagcagttccagcagggcaagcttctcgcctgtattgcctcaagaccaggccagtgtggcagagcagatggctatgtgctcgaaggcaaggagctggagttctatctgcggaagatcaaagcccggaaaggcaaataaactgtcatagctcgtgtaataaaggtgtttgctgttctgtatatgt

SEQ ID NO: 1506 - DNA, 2288 bp, Rattus norvegicus
gcggtagcgtgtgacaggaggcctatggcacctgcccagtcctacctcagcccatcttgaaaaaatccttagacaacatggaaccaccacgaggccctcctgctagtggggctgagccatctcgggcagttggcactgtcaaagtgtacctgcctaacaagcaacgcacagtggtgactgtccgggatggcatgagtgtctatgactctttggacaaggccctcaaggtgcggggtctcaatcaggactgctgtgtggtctacagactcatcaaaggaagaaagacagtcactgcctgggacacagccattgcacctctggatggcgaggagctcattgtggaggtcctggaagatgtgccactgaccatgcacaattttgtacggaagacattcttcagtttggccttctgtgacttctgccttaagtttctgttccacggctttcgctgccaaacctgtggctacaagttccaccagcattgttcctccaaggtccccacggtctgcgttgacatgagtaccaaccgccgacagttctaccacagcatccaggatttgtctggaggctccaggcagcaggaggttccctcaaatctctctgtgaatgagctgctaaccccccagggtcccagtccctttacccagcaacgtgaccaggagcacttctccttccctgcccctgccaatcccccactgcagcgcatccgctccacatctactcctaacgtccacatggtcagcaccacagctcccatggactccagcctcatgcagtttactgctcagagcttcagcaccgatgctgctggtagaggtggtgatggagctcctcggggtagccctagcccagctagtgtgtcttcagggaggaagtccccacattccaagttacctgcagaacagcgggaacggaagtccttggcagatgaaaagaaaaaagtgaagaacctggggtaccgggactcaggctattactgggaggtgccacccagtgaggtacagctgttgaagaggatcgggacaggctcttttggcactgtgtttcgggggcgttggcatggcgatgtagctgtgaaagtgctcaaggtggcccaacctaccgctgagcaggcccaggccttcaagaatgagatgcaggtgctcaggaagacacgacatgtcaacattttgctgtttatgggtttcatgactcggccagggtttgccatcatcacacagtggtgtgagggttccagcctctaccaccacctacatgtggctgacacgcgctttgacatggtccagctcattgatgtggcccggcagactgcccagggcatggactacctccacgccaagaacatcattcaccgagacctaaagtccaacaatatcttcctacatgaggggctcacagtcaagattggtgacttcggcctggccacagtgaagacacgatggagtggggcccagcccttagagcagccctcagggtctgtgctgtggatggcagctgaggtgatccgaatgcaggacccgaacccctacagcttccagtcggatgtctatgcctatggtgttgtgctctatgagcttatgaccggctcactgccctacagccacattggcagccgtgaccagatcatctttatggtgggtcgtggctatctgtctccggacctcagcaaaatcttcagtaattgccccaaagccatgaggcgcttgctgactgactgcctcaagttccagcgggaggagcggcctctatttccccagattctggccacgatcgagctgctgcagcggtcactccccaagattgagcggagtgcctccgaaccctccttgcaccgtacccaggctgatgagttgcctgcctgccttctcagcgcagcccgccttgtgccttagactccactcccagcccactagggagccattttcagcttaccatgccaaggcacccccttcctaccagccaatcattgttctgtctgtgccctgatactgcctcaggattccctatcccacaccctgggaaatttgggggactccaaaaactgaggtcccctgcttcctccataatttggtctcctcttggctttggggatagttctaatttggagagctgttttacctccaatggctgggattcagtgcaaagattccactcggaacctctttataaagttttcgcctgacatgtcttcactgaattatggggttcccagcaccccatgcggatttgggagtttccctttgtctccccccactattcaaggactctcctctttaccaagaagcaca

SEQ ID NO: 1507 - DNA, 2134 bp, Rattus norvegicus
cgctgcaccatgagcgtctctgcactgagctccacccgcttcacgggcagcatctctggcttcctccaagtggcctccgtgcttggtctgcttctgctgctggtcaaagcagtccagttctacctgcaaaggcaatggctactcaaggctttccagcagttcccatcacctcccttccactggttctttgggcacaagcagtttcaaggtgacaaagaactacagcaaattatgacatgtgtggagaatttcccaagtgcctttcctcgatggttctggggaagcaaagcctacttaattgtctatgaccctgactacatgaaggtgattctcgggcgatcagatccaaaggccaatggcgtctacagattgctagctccttggatcggatatggtttgctcttgctgaatggacaaccgtggttccagcaccggcgaatgctaaccccagccttccactatgacattctgaaaccctatgtaaaaaacatggctgactccattcgactgatgctagacaaatgggaacagctggcaggtcaagactcctctatagaaatctttcaacatatctccttaatgaccctagacactgtcatgaagtgtgccttcagccacaatggcagtgttcaggtggatggaaattacaagagctatatccaggccattgggaacttgaatgacctctttcactcccgtgtgaggaacatctttcatcagaatgataccatctataatttttcttccaatggccacttgttcaaccgtgcttgtcaacttgcccatgatcacacagatggtgtgatcaagctaaggaaggatcagctgcagaatgcgggagagctggaaaaggtcaagaagaaaagacgtttggattttctggacatcctcttacttgccagaatggagaatggggacagcttgtctgacaaggacctacgtgctgaggtggacacatttatgttcgagggtcatgacaccacagccagtggagtctcctggatcttctatgctctggccacacaccctaagcaccaacaaagatgcagagaggaagttcagagtgtcctgggggatgggtcctccattacctgggatcacctggaccagattccctacaccaccatgtgtatcaaggaggccctgaggctttacccacctgttccaggcattgtcagagaactcagcacatctgtcaccttccctgatgggcgctctttacccaagggtatccaagtcacactctccatttatggtctccaccacaacccgaaggtgtggccaaacccagaggtgtttgacccttccaggtttgcaccagactctccccgacacagccactcattcctgcccttctcaggaggagcgaggaactgcattgggaaacaatttgctatgagtgagatgaaggtgattgtggccctgaccctgctccgctttgagctactgccagatcccaccaaggtccccatccccttaccacgacttgtgctgaagtccaaaaatgggatctacctgtatctcaagaagctccactaattccggacttcttcattataccaataatcaacggtcacaaccttgatggtcgggaataacaggacgttattatcttacagttgtggagctccgaaatctgaaatgagtttcactggcagaaagctgagttggtggtgtgactagccttcttcagaagagtgcttcagagagtcctctcctcctctcttcagtacagatcacccttctcagcactggaatattcctctgctttaaagccagcacccttcccataccccctcttctaaaagccttcccttttacaaatgttcttatgacatcatcaagaccactgaaaaactccaagataatttcccatctcaatattccttactccatctaacctactaagtcccttttgaattatgaggaataattcaatttgttccatgggctccaaaactcaaggcctgagcattattgtgaaacctttattcagcctaatatcatcttcacaagactgttacctggtacgttcatctaaatctcccctgcatagtctctctacctgactattcctcacacaagtttctttaccttccctcctttctccaataaagtgtccagtgtcctgcac

SEQ ID NO: 1508 - DNA, 2324 bp, Rattus norvegicus
gtgaacgtgtttggcagcggcaactaaattcagaaaacatcatggcagagcaggtggctttgagccggacccaggtgtgtgggatcctgagggaagagttgtaccagggtgatgccttccaccaagctgatacacacatatttatcatcatgggtgcatcgggtgacctggccaagaagaagatttatcctaccatctggtggctgttccgggatggccttctacccgaagacaccttcattgtaggctatgcccgctcacgactcacagtggatgacatccgcaaacagagtgagcccttctttaaagtcactccagaagaaagacccaagctagaggagttctttgcccgtaactcctatgtagctggccagtatgatgatccagcctcctacaagcacctcaacagccacatgaatgccctgcaccagggaatgcaggccaaccgtctgttctacctggccttgccccccactgtctatgaagcagtcaccaagaacattcaagagatctgcatgagtcagacaggctggaaccgcatcatagtggagaagcccttcgggagagacctgcagagctccaatcaactgtcgaaccacatctcctctctgtttcgtgaggaccagatctaccgcattgaccactacctgggcaaagagatggtccagaacctcatggtgctgagatttgccaacaggatctttggacccatctggaatcgagacaacattgcttgtgtgatccttacatttaaagagccctttggtactgagggtcgtgggggctattttgatgaatttgggatcatcagggatgtcatgcagaaccacctcctgcagatgttgtgtctagtggccatggaaaagcctgcctctacagattcagatgatgtccgtgatgagaaggtcaaagtgttaaaatgtatctcagaggtggaaactgacaacgtggtccttggccagtatgtggggaaccccagtggagaaggagaagctaccaatgggtacttagatgaccccacagtaccccatgggtctaccactgctacctttgcagcagctgtcctctatgtggagaatgaacggtgggatggagtacccttcatcctgcgctgtggcaaagctctgaatgagcgcaaagctgaagtgagacttcagttccgcgatgtggcaggtgacatcttccaccagcagtgcaagcgtaacgagctggtcatccgtgtgcagcccaatgaggcggtatacaccaagatgatgaccaagaagcctggcatgttcttcaaccctgaggagtctgagctggacctaacctatggcaacagatacaagaatgtgaagctccctgatgcctatgaacgcctcatcctggatgtcttctgtgggagccaaatgcactttgtccgtagtgatgaactcagggaagcctggcgtatcttcacaccattgctgcacaagattgatcgagagaagccccagcccatcccgtatgtctatggcagccgaggtcccacagaggcagatgagctgatgaagagagtgggcttccagtatgagggtacctacaagtgggtgaaccctcacaagctctgagccctggaaacttacaccatctgcactctgcctcttctggccaccctttctgcatctgcccttctcaccatctaaccctctattaggactattgacctcatattggaaagactttgggaccataggccttagctacacattctagtccctgggcttaggccaccattctgtcctatgctgctgccactgccactaccactaagcccagctacattcctcagataccaggcattcaaaacgcattgcaatgctttcaggaccaccactgtccctatctgagccacccatctttccacaagacctgaatcacctcctcccctcaatcccctgcagaaagaacgcctatcagtctgtccctggactccttaagataggagttaggaacaattgggaggagccttgggccttggagggacaatgaccaaaccacacttccctgagactgtgggcaagctcctcaaaacttaaagtgatcaaggacacccatctgagaggacctgcccatagccacactagccttagtgctacttgacattcctcctcaccagctggaagaactctcatgctgcctagcaatattttgggggccatagatatctcctaaacaattccatagtccatagtcagcctcatccaacccatgggcagcctccttaccaaaggaaggtaagagcagcagctagaattttcctaccccaaccctgccattaaatcctcaaaaaaaaaaaaaaaaaa

SEQ ID NO: 1509 - DNA, 7776 bp, Rattus norvegicus
ggatcccggcatccgggcttggaaaggggttttagttgagaattaacaaaccattaacagcgtgtacatagtaacaagttggagttactcctaagtcttcccaatactgaatatgtaagtaaccagtcagtcccacttattctttaacaatgtaactttggtgggggctggggatttagctcagtggtagagcgcttacctaggaagcgcaaggccctgggttcggtccccagctccaaaaaaaaaaaaaaccaaaaaaaaaaaaacaaaaaaacaatgtaactttggtggatacaaattcactgcccagactcttttccggtccagacttctcaaagtgacttagttgtagctaccctgaaagatttaacagaataagggacagctgttggcttgaaacccctcaacctcttccctaacatgcgactcttgcttagataaaaggcattatcttagcatgcaactggtgcctagaatctagttggaagctaccaacgtaaaacggagtggctctccagcctctgctggcttgtctctcagcaagttttcaggcataggcacacagggtggtgaagcagggtcaatctacaccacgaagtctagtctacgtggcccgcacacaactcaaggcccatccatcctcggctcgcacctgcgatcccgccagggaataaatactacgcgctgaatgcaaagccgaggaagagttttgctagtcttccaggccagggctcagccgttaggacccggggagagactgcgtgattgaaccggttgcaagacggacgaccaagcgcctgtgcgcatgcaccggccgaatcccgcctgctgcccataggaccctgcggcaagctggtagtcaggactggtggtgtggtgcgcgtgcgcgggcctgccgcagggagtgtccggcacgaggccgggcggggagcgcgggcggatgggcggggggctgggcacgcgcggcgccccgccccactgacgcgccgggcccgcgcctcccgcctccggcgtcgggaaccgggttggccgccaaggagtccccgcccctcccccgcgcctcccggccggaaccgatcggggctggtttgagctggtgcgtctccatgacgacgtgctccgcctataagtagcggcgcgtcgcaccgtcgggctttgtcagtccctgcagccgccgccgccggccgccttcagtcagcagctcggcgccacctccggtcggcgactgcggcgggctcgacgaggcggctgacggggcggcggcgggaagacggccgggtgcgccttggggtttagtggcggcttctccatgggtccagccagccgcttccctgtgctgtgaggtaagcggggcgcgggaggattgtgcggccacgtgtcgcgaggcccggactgcggtcgccggcaggggacacgtggccggaggctggtgaccttgcgagcctccgccctgaaggcagcagctgttcctggcccttggctgcaagccctcggatcgccccatgggagcccgcatcgtgtcagccgggctcggcgctccacttgcccgggcggtgatggagggcaggtgcaggggagcccggccgctagcagccgccctgcagtttcctgctttctttagttttgctacgtgtacagagcagagctgatgactcgaagtggaagtcgatagacctaatttagtcagggagtccctgctaatgaatactcaccggctgtgacttggatttagaactgaactctttgaatgacttaggggtttacgggaaacggattcccggctgtcttggaagcccgactcagaatcctcaataactggtagaactggggagcagatcctgtcaggaatgtctgggagaggacaaaagaatgcagtggcttgttttattcaaacctaacatcgggcagaatttgactggagttcatttttgttttaattggcttgtatctcatccagatttaacttcttgtgctaattgtttaacaggatttagctgcttcccatgccaaagtgttagcattttttttcttttatcttttttttctttttctttttttttttttttttttttgtattgaggcaaagatagggaaaggcaaaataagtggtatttcaatgaaagttttccaggtttaagccggaaggctgcctggaaaatacttaacaagacctaaaattacaaagttactgccaaagcccattcatcagttctaagtgatatacaactgagttggctggcgctggtctgtagtcttcacttaagagaggtttatgcagctaacgaagttgaccagtgccaaaagtctccttaaagcttaaagtgtgctttatcatgcatggatttggatttatgacaggctcatccccgtggcctctcatagtgtcccgtgctagagcaaactggctcctaaccattgcccagccttggtgcatgtaggctgctggcactgaagtgggtcacacaatggaaaaaagttttacctggccacttgctgctggtgtccatttcataagacccaggcaggagcttttattaagcgtggtgatcttgcttatttttgttagtaaaaaagttggccaaaaatttcttccatatggttattatccataagtggatattagaaggcacttgaggactgttggattcccagaagtgcgcatttggtaggcaatccaggctctagaatactgatgtttcataacagtaacaatatactgtgaattgaatttttttaaatgctagtactgcataaaagttagggaagttttggtggattgcacactaacattgagtgctctggatacctgatatactgtattcactaagtcattcagcataactctgcaagtgggagaaaaagaccttttcaggactgcatgttactgtatgcccattaaagtttttgaagagctggaatggctcaaatgaagcagataggaacatgtaataatgccagtaattagactgttaactccgttccgttttggagaggggcagggattgagatgttctatgtgtatagagctgtggcattcagttttgaacagtgtggaatctatttgagtattggagatatttggggggggggtcttcacgtagttctgacctcacagttgatcttcctgtactgtgtactctctggtatactgttgcagtgtgtaacctttaatggtaagatttcaagggagatagcaacatgttgtgtttctactcactagtgtttccaccactccaggagacagcattcagagttgaccttgtgagagctggccataatttaattccatctctaggttttctgtgtaagtatcagtttatacttgtgaatttgtgttgaagcagtgctaagactttgagtgcattcacttattatctgcttattgtcagcttattgtttcagaggcacatcgagaaccaaccatgggcagctttactaaggaagagtttgactgccatatcctcgatgaaggtttcactgctaaggacattctggaccaaaaaatcaatgaagtttcttcctctgtaagtacgggaagcccacagccacaactcaaaagttccataaaagagcatgccttgccagagaatctagaatttgactgactgggctgtctagtgagtgtccatgtcagtactgctaacagggataggattttgttagggaagggggaaaaagatcttcagtgtggccaggtgcaagactgttaatgaggtccctgaacccactcactctcattccaggatgataaggatgctttctatgttgcggacctcggagacgttctaaagaagcatctgaggtggctgaaagctcttccccgtgttactcccttctatgctgtcaagtgtaatgacagcagagccatagtgagcaccctggctgccattgggacaggatttgattgtgcaagcaaggtaagactgcttatctcaccccaaaagggttatcagttgatgtgcttttgtttgtcaaactccgtctatatatactgatcttctctttcagactgaaatacagttggtgcaggggcttggggtgcctccagagaggattatctatgcaaatccttgtaagcaagtgtctcagatcaagtatgctgccagtaatggagtccagatgatgacttttgacagtgaaattgagttgatgaaagttgccagagcacatccaaaggcaaagtaagtcttctgattgagcacaaaaaggctgggcttgctaggcagactataatcttggttccttattcctatacatagtaagaaccaggctaaaccctgggttagaatcagacccacaagcagtagtgcctagacaggctgattggatgaacgtgtacagagtgcttacttggtgcatgcacttgtttctgtccacctaggttggttttgcggattgccactgatgattccaaagcagtttgtcggctcagtgttaagtttggtgccacactgaaaaccagcaggcttctcttggaacgggcaaaagagctaaatattgatgtcattggtgtcaggtgaggtctcagtgatagttacagactgagacattaaattttaaggcccttttttcctctgagaactagtcaaagaacagcatcttgtttttatttcagcttccatgtgggcagtgggtgtactgaccctgagaccttcgtgcaggcagtgtcagatgcccgctgtgtctttgacatgggagtaagtacatgactcctggaggagggctgtcttgattgaaataaccaaaccactgaatctagaatttgcctcttgtagaagctgtctgcataacagattttaaaaccatctgtcctgtgcatttaaacttgtgaatctagcaatttgacttccaaattttcttgattctagacagaagttggtttcagcatgtatctgcttgacattggtggtggctttcctgggtctgaagacacgaagcttaaatttgaggaggtaattattacaacattaacctacagacggtgagatatgtatttaccattgtggtgtttttactgattaaaggagccaacatgcctggtgttttgttctcactacttgttatttgcaactgtagcccaggctggccttgaactttcagttctcctgcctgtttcccatattttaatgtttagctcagtgcttatcactattgtactatgaagtagacagggtggaaggagttatatcttgttggcatgtattcagaattcagcatttggcccctcttgtaatccattttgtgctattttattaaatattaatataaactattcataatgtgttagaaagagatggtcctgaggggagtgggaagtggtgtatgtacagactagtttccagagaggtttgttgcttctgttgcctgatgacagacctgctatgctaggtcatgtcctgttcttacacacagcagtgtgatctttctcctcaactataacaaatggctgctcccttctctcacttagatcaccagtgtaatcaacccagctctggacaagtacttcccatcggactctggagtgagaatcatagctgagccaggcagatactacgtcgcatcagctttcacacttgcagtgaatatcattgccaaaaaaaccgtgtggaaggagcagaccggctcggacggtatgtggtggcaggatgagtgagtcatgtgggataacagttgatatgctgggtggtaattagggtgatctgtttttctagatgaagatgagtcaaacgagcaaactttgatgtattacgtgaatgatggagtgtatgggtcatttaactgcattctttatgaccatgcacatgtgaaggccctgctgcagaaggtgagttctgagcgcatgctctagcagtgagtgatgcataggatagagagaacattgggccgagagatggctcagcagttaagagcactgactgcttccagaggccctgagttcaatcccagcaacaacatggtggctcaccaccatctgtatgtaatgatgccctcttctggtgtgtctgaagaatagctacagtgtatttataatctttaaaaaaaaacaaacaaaaaacaaacattgtctttatacagagacccaagccagatgagaagtattactcatccagcatctggggaccaacatgtgatggccttgatcggatcgtcgagcgctgtagcctgcctgaaatgcatgtgggtgattggatgctgtttgagaacatgggtgcatacactgttgctgctgcttctactttcaatgggttccagaggccaaacatctactacgtaatgtcacggtcaatgtggtgagtggggctgtgcctgctcatgctcttttggttgctcagtgtaatgtttgcctactgtgagccagaagcctgggttatgcctgatgcacacacacacacatactatggggggaaggcagtatgtgctgaggggaaggatcacctgacctgtctcaaagggactgaatttgtgcttgctttttatgtttgataagttttttttttaccttgagctaaatacagaaatggagtttttccaagtaattactgctcatcttcagatatttactactaggagaggtcttacaagtaagccattagattcttttgcaactaaaatattcaagttagcatatgtgacctgtgggttccttaataatgaaattttacattggattgtttcctggtatagtgacagggtgaggtgtcaggagatctcttgggaggctgcccaatttggagggatttgggttttgaatatgccatatatgcctttgtttttcaggcaactcatgaagcaaatccagagccatggcttcccgccagaagtggaggagcaggatgttggcactctgcccatgtcttgtgcccaggagagcgggatggaccgtcaccctgcagcctgtgcttctgctagtatcaatgtatagatgccattcttgtagctcttacctgcaagtttagcttgagttcacggcatttggggggaccatttaacttaattactgctagtttggaatgtctttgtaagagtagggttggcaccaatgcagtatggaaagactaggagatgggggtcacacttactgtgttcctatggaaactttgaatattttatatggatttttattcacttttcagacctgatactaatgagtgcccctcggctgctgagcaagcatttgtagcttgtacattggcagaatgggctaaaagcttatgttgtgacccattttgaaaataaagtatcttgaaatgattggacattggagaatgtgtgcaagtatcccttacagaaggcacaaacttctgcacaggctgtgtgttacagcagtgagtctagcccagcagagatgtggatgatacaaagctgtgccccctctgtacagcatcaatgtgcttagcccatctcaagtgtttactgtgaacttggtgcccaaagtctcttaagagtgtcatctgcctagtggcctcttgacttggccacttcctaaggagagggcatctgaggctctttgaaccttgcctgcagaaaccctgactgctccctcaacccttggcctcagctgcatcaccacctagtaacagttgaagtatcgaacagcacttggcagtcaacttcctgtaataaattcaacaacagcaactactgtgttgtaaatttttaccttgacctttcatattatagtcctgctcagtttatacacctattgcatccccaaagaaatgccagactcttaacctagttagtattgaagacctgtaggtcaggaggaagggatcc

SEQ ID NO: 1510 - DNA, 4964 bp, Rattus norvegicus
gaattctgatctctgctctgcacacattcactgcccctctgcacaacacccatgtacatttaaaaaaaattaagaaacaaaccaaaggggttggggatttagctcagtggtagagcgcttgcctaggaagcgcaaggccctgggtttggtccccagctctgaaaaaaagaaccaaaaaaaaaaaaaaagagagagaaacaaaccaaaaaccccaaaacaaaagtgttaactgtttcaattctaaactggaggccctggtctccactcctggtttttagcagttttccctgcctgtaaaatgagagtactaacagttactgctgtagcatcttctatgggttaagagtttcactgttcttctagcagttctcagaaaaatgatcatcttctaaaggttaagagtttcactgttcttctagcagttctcagaaaaatgatccgatcactacacctaacctgcccaagtgacccaggagctacagcgggtgaatgacaggtgtggattggactagctgggaaggaccggcttcttggacctcaccaggccaacgagtgtctaaacttgaggcatccagccaggcatggcggcacacgcctttaatcccagcagttcagaggtagaatcagacagaactcagagaaagggccatcttggcctacacagcaagctccaggccagccaggagctcctgtctctaaataaacagattaaagagaaataaaaaaaatcaactttttgatttgaggagcatcgtggagggcagctaggatcagcaagtttcacagcctcttcagacagtaagtagagtacccttgtcagccagccaagcaaatgcagaaagtcaagcttcattccaaatgtctggtaccagggagcttgccccgcacctcgcagaagccacaacagtacttctttcggtggcactggtcccactggtagtctctaagcgtccctccctacaccgcacgcacttcgcccctcaaggctacaacttcctgtctagataactaggctccgcccaggcccgtaggctccgccccactcataataaaagactggattcagctccacccacgaacaactaccccggccctaggccggcctcctaggcgccaacctcaccctagcggaaagctaggccggggctccagttttgcctctaccaggctaggccccacccgtgggagaagactaggcttcgccactagcagaaggcttggatttcatcctatcccataaacacctaccccatggctctgtcctcatccgtagcagaaagctggaccatccaccgtcccagccggctggccccgttccttagcttcttctctcatacttagcagaaagatgaccccaccccattgctccggtcccgcccctagcagaaggctggactctgccctaccctacaggctccatcctgtatggctcctgcctgcatccctcatacaagtctggattctgtccagcccacaggtctggccccatccatagcaaaaaggttggactcctccccagcccaccactaggtatgcgactctagagatcgggtaccgagctcggtacccggggttcctctacaccccccctgcaggacctatcccattccatagatccgcccctcacagaactttactccgggttccagccagtagcccctaccctgagcacgctccaccctgccctcagactccatccacccaggcccaggcccagtactaggctggccaccctcccggatcaaggcccaacccttttctaatgactggaccctccctatcccagcaaggcccgccccagctaataggccccgccacccggcccagcactggactccctcggggcacacaggtcccgcccccgcctcaggctcccacccaccccagtgcaaggctaaactcctctttgcagaggcgccgccccaccccgcctcctccagcctggtggttccgcagccgtactctcctggcctggtgtgcacagcctcaccatgagttcttctgcagccagcccgcttttcgcgcctggcgaggactgcggccccgcgtggcgcgcggcccccgcggcctatgatacgtctgacacgcacctgcagatcctgggcaagccagtaatggagcgttgggagaccccctacatgcattcgctggcggctgctgctgcctccagaggtactctgcccagaagaaacggaggctactgtttaaggagtgtaggagttcccatgcatgctgcatgcctgagtttccttacctgaggcactgagctgccttggggttaccttggcagggaagggaagagtgttggcaaaatgtagacgcaggcaagagaagccggctccgaactagaacttcctctcctggggaaaaagacttctacttcccggagctgggttggagggtggatcttcggaccacagcctcgagtggagcttagagaacatggaggggcgtgggacttgtgcgggtcgggaacctccgagtttccccaggctgttgctaagaatagcttgggaaaacggagcagagaggcagctgtccggtgctatggccctgaacttctggacgaggggtggtgtctgggacaccccagcctcaaacaggtcaatagccaaagggcttcaaagttcacccggagcacatgaggacctggtatcaagtgcggaatgaaacatggaggggttacagtgtcgggcctcagaaccaggcttggccctttataaccccacatagggccatagcacaaatagcgtgggtgggcatgggctcagagtccagggatccctggggccaagcccaaaagcacgtggccagtccctcaggctcccaggctcgccgctctgattggcagctggccagggcccacactctctgtgctactttgttctgtccacccactgctggctggctgtccttgaggcatgtgtgagaccggtccaccctaaccgtccccctcccccacccatgccagctgtagtgtttttgtcctcctagggggccgggtcctggaagtgggctttgggatggccattgcagcctccagggtgcagcaggcccccataaaggaacactggattattgaatgcaacgatggggtcttccagcgtctacaaaactgggccctgaagcagccacataaggtaccttctgtcactggagtaggaggctgggagtacccccccgggactagggagatcatcgggggtaccaatgtgaccccttatatccttctcttgctcccttctcctctccaaggttgttcccttgaaaggcctgtgggaggaggaggcacctacactgcctgatggtcactttgatgtgagggcactttgggagcctggcaagggggttggcctctgggtactgattggcagcctcttgggctatcataccctccttagctcagtggagcttgccgtcaagaatgaggaccagagtttgatccccaggatgcatgtggtgtaaggagagaatgggtgctcataagttgtcccctaccccaacaaatgcacctccaatgtgcactggggacatagcctccgggaaaaggctccatgaactggctagcagaggtgctaagggcagctgggcgggctgggcagtttggcctccaaggccatgggataggtgggatgaagcttgggcaaggctgtgccagccctgactggcaggcctgtgttcacgctgcaggggattctatacgacacatatccactgtctgaagagacctggcacactcaccagttcaactttattaaggtgggactgcagggccggggaccgagggccttggacggtcaggtgggcagggtgtgatatctacagaccagcagctctctgctcatggtccctccaccccttcttgtccatgccctttctctctctctgcagactcatgctttccgtttgctgaagcctgggggtatcctcacttactgcaacctcacgtcctggggggaactcatgaagtccaagtacacagacatcactgccatgtttgaggtacgctgcctcatagcaagtgggggctccgacccaaaagccaggcagtggcccggcaagtgtggtgttgagacccatgacatgggggagaggtccagtcagggcttctctgcagcccgaacctactgctctctgcctgtggggcggtgcctgagagatgcccaccagggccatcaggacagcttcccttcagcgcatgaggcagctcttggcacagaaaactcctcttgctcgagaggcctacagcaggcctgtgcaaggatgctggtctgagacacagctgaggtcatcaggaaaactcgttgcctgcatagaattcacactcacactaggccctgtcccgcatcatcagtggtgacctgtgacccctccctacaggagactcaggtgcctgcactgctggaagctggcttccagagagaaaacatctgtacagaggtgatggcgctggtgcccccagccgactgccgctactatgccttccctcagatgatcacacccctggtcaccaagcactgagcggctggcccagggctacaaggagaatatgtcctcctcagtgcctttgtagctggagtgtgggctccagcctctccactatccctgcagtgtgacatcctaacctctgcctggtacggccatctccccagagctcaggagtaaaataaatgctaccaagactagtagtgggttggctggcggtgagccggaggtgaggcccgcatctggttcagagcctgcctctccctgcctccatagatgtggctattccatcactggtgctcagtggcccccgacccagacatgaccaatcaaccattgtatgttttcaacagtggcccaggaagagcctggggtctcaccagggtcagggtagggagagcctccacgggtcccagcccagcacacagcaagtcatgcaaccctcatggcacgaccctactctgaacatctctggtacc

SEQ ID NO: 1511 - DNA, 1539 bp, Rattus norvegicus
gaattccgcgctacaggcatttttgagtccaatatcttctacagtatgtctgctgctcggctctccgcggtggcacagtccaccgtgtatgccttctccgcgcgcccgctggcgggcggggagcccgtgagcctgggctccctgcggggcaaggtgctgctcattgagaatgtcgcgtccctctgaggcaccacgacccgggactacaccgaaatgaatgatctgcagaagcgtctggggcctcgtggcctggtggtgctcggtttcccgtgcaatcagttcggacatcaggagaatggcaagaatgaagagattctgaattccctcaagtatgtccgacccggtggtgggttcgagcccaactttacattgtttgagaagtgcgaggtgaatggtgagaaggctcacccgctctttaccttcctgcggaatgccttgccagcacccagtgacgatcccactgcgctcatgaccgaccccaagtacatcatttggtccccggtgtgccgcaacgacatttcctggaactttgagaagttcctggtaggtccagacggtgttccagtgcgcagatacagcaggcgctttcgcaccatcgacatcgaacccgatatagaagccctgctgtccaagcagcctagcaacccctaaggcattcctggtatctgggcttggtgatggctggctgccctccggggggaggtttttccatgacggtgtttcctctaaatttacatggagaaacacctgatttccagaaaaatcccctcagatgggcgctggtctcgtccattcccgatgcctttacgcctaaagaaaggcggtttcaccactaagaataaagtgctgcggaattccgtgtcttcctgggcacgtttttgtatgaatattcaagaaggcaccccgattactccgtgtccctgctgctgagacttgctaagaaatatgaagccacactggagaagtgctgtgctgaaggcgatcctcctgcctgctacggcacagtgcttgcagaatttcacctcttgtagaagaacctaagaacttggtcaaactaactgtgagctttacgagaagcttggagagtatggattccaaaacgcattctggtccgatacacccagaaagcaccctaggtgtcgaccccaactctcgtggaggcagcaagaaacctgggaagagtgggcaccaagtgttgtacccttcctgaagctcagagactgccctgtgtggaagactatctgtctgccatcctgaaccgtctgtgtgtgctgcatgagaagaccccagtgagcgagaaggctcaccaagtgctgtagtgggtccctggtggaaagacggccatgtttctctgctctgacagttgacgagacatatgtccccaaagagtttaaagctgagaccttcaccttccactctgatatctgcacactcccagacaaggagaagcagataaagaagcaaacggctctcgctgagctggtgaaacacaagcccaaggccacagaagatcagctgaagacggtgatgggtgacttc

SEQ ID NO: 1512 - DNA, 1495 bp, Rattus norvegicus
caatccaagacaagatgtccagcaagggctctgtggttctggcctacagtggtggtctggacacctcctgcatcctcgtgtggctgaaggaacaaggctatgatgtcatcgcctacctggccaacattggccagaaggaagactttgaggaagccaggaagaaggcactgaagcttggggccaaaaaggtgttcattgaggatgtaagcaaggagtttgtggaagagttcatctggcctgctgtccagtccagtgcactctatgaggaccgctatctcctaggcacctctctcgccaggccttgcatagctcgcaaacaagtggaaattgcccagcgcgaaggggccaagtatgtgtctcacggcgccacggggaagggcaatgaccaggtccgctttgagctcacctgctactcgttagcaccccagattaaggtcatcgccccctggaggatgcccgagttttacaaccggttcaagggccgaaatgatttgatggaatacgcaaagcaacatggaatccccatccctgtcacccccaagagcccctggagcatggatgagaaccttatgcacatcagctacgaggctggaatcctggaaaaccccaagaaccaagcacctccaggtctctacacaaaaactcaggaccctgccaaagcacccaacaccccagatgtccttgagatagaattcaaaaaaggggtccctgtgaaggtgaccaacgtcaaagatggcactacccacagcacatccttggacctcttcatgtacctgaatgaagttgcgggcaagcatggagtagggcgcattgacatcgtggagaaccgcttcattggaatgaagtcccggggtatctacgagaccccagcagggaccatcctttaccacgctcatttagacatagaggccttcaccatggatcgggaagtacgcaaaatcaagcagggcctgggcctcaaattcgcagagctcgtatacaccggtttctggcacagccctgaatgtgaatttgttcgccactgcatcgacaagtcccaggaacgggtggaaggaaaggtgcaggtatctgtcttcaagggccaggtgtacatccttggccgggagtctccactttcactatacaatgaagagctggtgagcatgaacgtacagggtgactatgaacccattgatgccaccggcttcatcaatatcaactcgctcaggctgaaggagtaccatcgccttcagagcaaggtcaccgccaaatagaccgtgacaaagaggccgggcctccccgctctgcagctctcccaggctccagcattaattgttgtgataaatttgtaattgtagcttgttctcctaccacctgactggggctgctgtgccccccctcacctcccccccacccacaggctttgttccctggtcccctatagcctacaaaagtggtcatcgaagggaagggggggtggcaggcagctgcagaaagcgcgtaaaatgacaattaa

SEQ ID NO: 1513 - DNA, 492 bp, Rattus norvegicus
tggaaaagatggctgcactgggtccgaaacagtaacacaggatgcccgccgtcgtacgatgggtactgcctcaatggtggcgtgtgcatgtatgttgaatccgtggaccgctacgtgtgcaactgtgtcattggctatattggagaacgatgtcagcaccgagacttacgttggtggaactggcgccatgctgactacgggcagaggcacgacatcactgtggtgtctgtctgtgtggtggcgctggccctgctgctcctcttggggatgtgggggacttactactacaggactcggaagcagctatcagagagctcaaagaagccttccgaagagtcaagcagcaacgtgagcagtaacgggcctgacagcagcggggctggggtgtcttctggtccccaaccttggtttgtggtcctagaggaacaccaaagcggggctggggtgtcttctggtccccaaccttggtttgtggtcctagaggaacaccaa

SEQ ID NO: 1514 - DNA, 1627 bp, Rattus norvegicus
cccctgaagactggataactgtcatggaggattcacagtcggatatgagcatcgagctccctctgagtcaggagacattttcatgcttatggaaacttcttcctccagatgatattctgcccaccacagcgacagggtcacctaattccatggaagatctgttcctgccccaggatgttgcagagttgttagaaggcccagaggaagccctccaagtgtcagctcctgcagcacaggaacctggaactgaggcccctgcacccgtggcccctgcttcagctacaccgtggcctctgtcatcttccgtcccttctcaaaaaacttaccaaggcaactatggcttccacctgggcttcctgcagtcagggacagccaagtctgttatgtgcacgtactcaatttccctcaataagctgttctgccagctggcgaagacatgccctgtgcagttgtgggtcacctccacacctccacctggtacccgtgtccgtgccatggccatctacaagaagtcacaacacatgactgaggtcgtgagacgctgcccccaccatgagcgttgctctgatggtgacggcctggctcctccccaacatcttatccgggtggaaggaaatccgtatgctgagtatctggacgacaggcagacttttcggcacagcgtggtggtaccgtatgagccacctgaggtcggctccgactataccactatccactacaagtacatgtgcaacagctcctgcatggggggcatgaaccgccggcccatccttaccatcatcacgctggaagactccagtgggaatcttctgggacgggacagctttgaggttcgtgtttgtgcctgtcctgggagagaccgtcggacagaggaagaaaatttccgcaaaaaagaagagcattgcccggagctgcccccagggagtgcaaagagagcactgcccaccagcacaagctcctctccccagcaaaagaaaaaaccactcgatggagaatatttcacccttaagatccgtgggcgtgagcgcttcgagatgttccgagagctgaatgaggccttggaattaaaggatgcccgtgctgccgaggagtcaggagacagcagggctcactccagctacccgaagaccaagaagggccagtctacgtcccgccataaaaaaccaatgatcaagaaagtggggcctgactcagactgacagcctctgcatcctgtccccatcaccagcctccccgtcccctcctttcttgccattttatgactttagggcttgttatgagagctgacaagacaatgctagtcccttcactgcctttttttaccttgtagatagtactcggccccctctatgcaaactggttcctggcccagattggggaatgggttggtagttgctgggtctctgctggtccagcgaaatcctatccggtcagttgttggacctggcacctacagtgaaatttcaccccaccccaccgcctgtaagattctatcttgggccctcatacgatctgtatcctccaggacccatttcctccactctgcaaagcctgtctgcatttatccatcccccacccctctccctctttttatctctttttatatatccaatttcttattttacaa

SEQ ID NO: 1515 - DNA, 9578 bp, Rattus norvegicus
gaattccggagctgctgtgggacagccgccctggaattgcgtgtcactgagcaagctgttcttcaccctgaggacatccaaggaacatctccagagattgcccagtgtcccctgggtacaaaaatcacaccaccttgaggacagctgagttgaacagaggtgtgggaaggaggcgtgtgagaatgatcggcaaagctggtgggtgtgggggctgggaatccggcgcagatgactgagggctttcctggcattctgagggacctgagtctgatcctcagtgccatgtgaggtgggcacggttggcacgcgcctgtaatggcagcattctgaaggcggaggcaggaggatcgggagttgaagggcatcttcagctactcggtgagtccgaggccagcctgggttatgtgagaccctgactcaattttaaatgataggtgtgtccaaactacccagtcctgttgtcatctgtccccagcccaacccaatcctccacatcagctctgcactctcttaaaactatgagtccctgggttcaattcccagtgtcctcagctaccctctgccctggtgactctcagcaaacaccatcctccaagcctgccctcatctacaacaaggactaagggagcccacccactgctgtgtcttaacacacgtgaaaccccccacacaggaggcaaatgatgtggaaccagggtcccccattgctttggcaatgagatgctggtccagagagtacaaggtagctgtgtccacacatgggctttgtgtcatcctggcttgcctacttccctctatccctgacccaaacctgtggtcatccctaatgcggatggtcagaaagaacaatgcacaccacaggccagaaaaagcagcagacgtggggctggagagatggctcagtggttaagagcactggctgctcctccagaggtcctgagttcaaatcccagcaaccacatggtggctcacaaccatctgtcatggactctgatgccctcttctggtgtgtctgaagtcagcgatggtgtgctcacatatattaaataaacaaataaatcttttttaaaaaaaagcacatggactctgtgtgtgtgtgtgtgtgtgtgtgtgtgtgtgtgtgtgtttatgctgtggacacacaggtctctgcacacagcctggaaacgggtcagaggggatggtcacgatggtcatagtggtggtggtggtgatggttactggtactgatactgatggtagtgctgatagtgttgacagtggtggccaatagtgaatagtgatggtgatgataaaggttaccaacactggctacctgttcaatttcaagtctctcacctaacgcagtcccacctcttcaaagcctggaacagcggtacccatgtcatccctgtttacacacgaacagaggctctcgaggtcaaggttcttgcccagagccatgtatctagtaacagcagagcaggacttgaacccagatcccctttgtctaacccatacgcccttttatatgaagaggatggcaggggatggtggtaagcaaggggtgtcaatcatagcttgggcgtcaacccccaagtcccgcctttcactatctatacgagctgtgcctcatttccactctgtacagacctgttggatggttttacattgatttgggttcatgaagctgagccccatactccccgccctttttctttctattttgagacaggctctcactccttagtccaggctgtccttctgcctcagcttctattgttctggcttgaaggtgtgagttgccatatggctggcctgtgtgtttcttggccataaacagaccagcaactgtccggcttttctgttatttctgggattgacccctgggactctggcaggagctcctcagtgctgcgctgcccgcccacgagtcctataggcctttcggagatgaatgtcttcatttgcaacggaaaaaaaaaaaaaaaaaaaaaagaacggggagagaaggtgaggcggaccttggagggcagaacaagtggtgcagcatggaccagggggcggggatttctgggggcgtggcctgcctgggccctcattggctgcccggaggctcagcccggagaataaagccctggggtgtcctgccaactttccactctcccaggacacagacaaaatctacccttctcgctcgctctgtccagctcctcctgtgccgggtatgtggccctcagcctcagtctcaccccaagattgacagccagagcagggtaccgggaagggaagagggactgggactcatccagttcaagtctccatgtactgatctgtaaaatgggacgatgatataggccctctagatcaggacgtcgccggggtggctgtgacttggccaagtgctcgcatgagtcaaatgacaaggaagagacttctgccgtggaacccatgccgcaccggccacctttgccaagaccgcctgtgcctttttctctcgcaggtcatatcacctatagaggcggatgcgactggcctctggggtgggaatcagtatggagtacactgcccattttcccaaaggtttccaatgctacagcctgggacaggaaccaggcagggttcgccaaagccacctggaaggggtctgcgtggcggaaactatccactagccaaaggctgcactggctgggccttttgggtccagagaagaccctgtatgtcaggatggggctagctaggacaaagcaaagaaatttggagttactcttgtgtgccattgtttccgactgcctttcaagaggtcttctagaaagaggagtctggtggcttgcctataatctcagcacttgagagactgaggcaggaggatcacaagtctgtctctgtctgtctgtctcttgactgaggcaggagaatcacaaggagtttaatctctcctacactcacacacagtcactcgaattcgtgtagatgctgggaagagacaccacctgcctaggtttggtcccacttgactctgtatctctcttggggcttctcacagggctccaaggtgaaagtggctgagccggtgttaacccaaaggcttcctcactgtcctggctcccgaggggacctcagggtgccattagccaaacttgccgtgcagcctctatctgcatcgaggttccctctcattgtggacgctgtatgacgagggcaagccagaggtctctgttgcctcttccccatgccagaaaaagcaattccataattctatctttttaaaagaatgagagcctttcagagctcgatgctggatttccaggtcttttgggggttttgttttgttttgaaacagactcctatacagcccagggtggccctcaaactccctacatagccaaggttgaccttgaatggctagtcctcttgcccttgcccccaagcaatgggattacaggcctcctgcaccaagcccatttttttcttcaaaaatatgtatttgtcgaacacaggtgcggcggggcatacctgtgatcccagcaattgggagactgagacaggaggatccaaccttcaaagctacatggtaagaacatactgagtttgttttaaagcatgtgtggggttgggatatggctcagtctatgaagggcttcctgggaaagcatgagggcctgtgttcatattcccagaatgcacctcaaaaatgctgagctcaacaataaatggctatcatccctgcactagggagcaagagacagaaggacctcaagggacatccaggggcctctggaacctcaggggacttctgggaacctctggggacctcagagcctccggggttctctggccagccagttggactgaatcagggtgctcctggttcagtgcaagaccctgcctcaaaaatagtgggcagctgaggaggctactgactgatgttgacctctggtttctccacacacacacacacacacacacacacacacacgcacgcacgcacgcacgtgcgcgcgcacgcacacacacacacatgtttaagtaatatataatagggcaaaatgctgagcacggaggggtgctgtggcccggagggtcactcttcacaggtaccccatttggcccattttgtgtgtgtgtgtgtgtgtgtgtgtgtgtgtgtgtgtgtgtgtgtgtgtgtgtgctgacatactctgagctcatgggaacaggtcagcccgggttggttcctgaggactttgcagaaacagaccctggctgaccctggctgtgctttgttcccatcttgtggcctcattctgagccagtttgaacaagcccctccctctgaactttagcccaacgctgcagcctaaagatgtttctgagcttgtgaccttctaactttgggccactgggtagttggagctgagctttgatttggtgtcctttccttatcattatgggtatgaaagagtggtcctagagcccaggagggcagcctctcttgaccctctgtatctcctctctgcccccagccatggctgcccaggagtccctgcacgtgaagaccccactacgtgacagcatggcattgtccaaagtggccggcactagtgtgttccttaagatggacagctctcagccctctggctccttcaagatccgaggcattgggcatctctgcaagatggtacaaggcagggtggcatactggcaggagaggcagtccctcctacctgacagctgtagaggcaggtgtgcagatacacacccaggattccaaacggaggcaggaaggtggaaagtgaatggtatcccagagtgcatagcaagaacctgtctctaaggaataataataattttagggactgcagttgagacagctcggcggctgagagcactggctgcttttgcaggggacttgagctcagttcccgcaaccccatggtggctcacgatcaactataactccagctccaggagatccaacactctcttctgatttcccggagcaactgcatcacatgcatataattcaaaataagtaaatattgggctggagcgataattcagtggttaggaatacttggggctctttcagaacagccatgctcaccctcagcatccaagtgagcgaggggctgtaactccagctgcagggcatcaaatgctctcctctgccctctacaggcaatacgtacacacagacacaagtgcacataaagaaaacacatcttttttttttctttttaagaatttttatttattttacttatatgagcacactgttgctgtcttcagaaacaccagaagagggcaccagatcccatcgcagatggttgtgagccaccatgtggttgctggggattgaactcaggacctctggaagagcagtcagtgctcttaacccctaagccatctctccagcccaagaaagcacatcctaaataaataaataaaatatgttttaaagaaaataataattttagaataggtttcacacatcagggctctctctggctaaggggtgcccaccctacagactgacacctgcctccttaccccagttaatcaccttgggggagatgagcctgagagagtggttcagataccaagtgggcaagctcagatgttccagtggtgaggacgtgtcctaggcagggacttgggggtggcctgatccttcctcttgtccccacagaaggcaaaacaaggctgtaaacatttcgtctgctcttcaggtgagtgcccagttcgttttctttcccttcctaccctgttctgtgtgtcctgtggcccagcaccaggcattctccctggactctgggctctgcaacaacacatccattcgtagtcgtccagatttggggttccagaatgaggggcagaagtcactctggagatgagcagccccacgtgaggtcccaggccctccttcctgatacaccctctccactgacagcgggcaacgcgggcatggcgactgcctatgctgccaggaggctgggcctcccagccactattgttgtgccaagcaccacacctgccctcaccattgagcggctgaagaacgaaggggccacagttgaagtggtgggagaggtgagtgcagacctattgtgggcagcagagctggcgggtggaggtggggggctgataactggatagagccctcgttcatctcaatctcttcctgcccccacccctgcagatgctggatgaggccatccaactggccaaggctctggaaaagaacaacccaggttgggtgtacatctcccccttcgatgaccctctcatctggtaagttggagccaccccactccctactgcatgtgtggtctctgctcatgttctcgccggcacaccagccatgaggggtccccagatgcagagattcggagagatcgactcatcttggggtggctaggagcaaactaactagggaacgcatcggtggaggtggctttcatgtgccagcatctgccctgaacaactgaagcttggcccctgggaaccctgggagtcggtggggaatgagcatctaaggatgtgtccactggtgggcaggaaatgggggtttatctaccacacccacagccatctcctctctgggagtgcgtggggtgagggggtgggggggtggggtcttgtctcctaccctgtgccctgagcagcagggaggtcagaggtcaggttcatcatggcctggcatagagggaaaaacagaccttagctggtatctttgaccagcccttgtgtcttcaggaagccctgacctgacctgccacccctctcttgcccagggaaggccacacttcccttgtgaaggagctgaaggagacactgagcgccaagcccggggccattgtgctgtctgtgggcggtggaggcctgctgtgcggagtggtccaggggctgcgggaggtgggctgggaggatgtgcccatcatcgccatggagaccttcggcgcccacagcttccacgctgccgtcaaggaaggaaagctggtcaccctgcccaagatcaccaggtgagcccggggcacctctccagcacacaggcggtggagctgagcctttggtcctttgcccgaagccacactctcgcgcgccgtctgggccttgaacgtgagtccgttctttatgtgacagtgcttaagtgacgtccttcgcttcttgaggtcctcacgcctcatttcttttgctgctgtttgatctggcctccgaaatgtgccagaccctggctggtcctggactcagcctgggagaaaacaatctctggcctgcaaagaatttataaccaaaccccaccgcggcggctcaaaccaaactgagctctagttctatttaagactattaggggcaactcttcgaaccaggggctcagttcctttagtctcttgtcccgccactgagagtgttgacctagggtccaaagtggctgctttggtgccagccaccgcacacacactccctctgaaaagaggctaagcaagagcagaagtgtttctaaactttaaagaccaagtagagctgctccccagctgacaatggggtcacacccaatctttaaccattcgttaaagattgctatgaatgagttgaacctggtctgctggacgccttacctaagctttttggcacacggtacagaactggctgcttcttgctgataggctgatgggagaggtctccctcaaggctgccactgggcaacccaagagcggattgtactgcaaacccatagtctgagaaaaggtctgagttcaactctcaaagtttggtttgtaccaaatgtggatttttttttttttgacaccacaacgttgaactctcatagaccaaccctcagaaatcagagctgtctgtacttccctcttatcatgcactgggcagtgcttggtcacatgaccatacctagctgcaagggaggcagggcaaggttcacactaggcatccacaagaacagctagaagggatttctagagagaggatggcttctgtcataggtagggaacaccgaatcagttaaaagactcttccatatttttgggcaccatggtgagactgatgccatcctgctaccactattctttcctgccgataggaatacagatgcagtagctggcactcaagcagccatttttggaccctaagttaatatgaccctggggcagatattgcctcatctgtttcccactctatacaacttggagcttggaaagtgtgtgacagacacctgatactttaggaaggactagttctccctgtttgttagagtgtgggagggctgtctgagagcctcaactaatccatgagaccaaggagtccctctgggagtctccctggaagaggtagcaagtgagcaaagcaggcggaggttacaagctggcaggctgggggtgggggtggggcagcagagtccttctggtatctgaatcaggccagtttgatatcctagaccactgtacaggttcctggggctgggcagggttgcccactcccactgttcacctgtagtccccgcatctcacgtgcacccttctaccttgtctctccccatgtccacccccctctcattcccacctcccagtgttgccaaggccttgggtgtgaacactgtgggggcacagaccctgaagctgttttacgaacaccccattttctctgaggtcatctcagaccaggaggctgtgactgctatcgagaagttcgtaggtatgttctgtgggatctttttgtccttgattttctccctcctcagcctagaccatctcatgaaaggaaactaaagccagtcagtggtaaacgcaaaagctgctcgagaaaacatgaacctggttaaccatgatagcagggaggacaaactagttttataagtgccagttttgagctttctggtagccagagtcaaaagggaaagggccaagatgaggtgatctctctgggcttagcctgggagatggtcaaaggaacgagagtagtgcacactgccattaataacttcagcttgctacaccactagagagcaaccttctcaggggcccaggaaccccaagcacagactgtagaaaccgagactgggttcagaacaaacagtcctggccacagtgactgacgagagctgacgagccccctcccctacagacgatgagaagatcctggtggagcccgcgtgtggcgctgccctggctgcagtgtacagcggtgtggtgtgcaggctgcaggctgagggccgactgcaaaccccactggcctcgctggttgtcattgtgtgtggtggcagcaacatcagcctggcacagctgcaggcactcaaggcacagctgggcctgaatgagctactcaagtgatatctgctgctgccctggccaccctgaggggtcaccagcacccctgagtaggctgggtgggcgtccgcctgacagtggcccaccctcctttatccatgtttataatatgcactttttcattgtaaataaaaattaatatatatatgtttataaagcaaagatcttttgagctttgttattgacatggggtctatgtgcagcccaggctggcttcaaactggagatccaagcttgggtgaggtcgactctagaggatcgatccccgggcgagct

SEQ ID NO: 1516 - DNA, 610 bp, Rattus norvegicus
ggggggggggggggggagcctccgcctcggaccctgtagccgccgcgatgttgatgcccaagaagaaccggattgccatctatgaactcctttttaaggaaggggtgatggttgccaaaaaagacgtccacatgcccaaacaccccgagctggcagacaagaacgttcccaaccttcacgtcatgaaggccatgcagtctctcaagtctcgaggctacgtgaaggagcagtttgcttggagacatttctactggtacctcacgaatgagggcatccagtacctccgagattacctgcacctacctccggagatcgtgcccgccaccctgcgccgcagccgtcccgagactggcaggcctcggcccaaaggtccagagggtgagcggcctgcaagattcacaagaggggaggcagacagagacacctacagaaggagcgctgtgccccctggagctgacaagaaagctgaggctggggctggctcggcaacggagttccagtttagagggggtttcggtcgtggacgtggtcagccacctcagtgaagttggagattatgttgtgttgaataaactttaaaaaaaaaaaaaaaaaaccccccccccccccc

SEQ ID NO: 1517 - DNA, 591 bp, Rattus norvegicus
cttttgtgagtggcagtgaacgagcacgcactgctatgaaggcgtcgggcacgcttcgggagtacaaggtggtggggcgttgcttgccaaccccaaaatgccacacaccgccactgtaccgaatgcgaatctttgcacccaaccatgtggtggccaagtcccgcttctggtactttgtgtcgcagctgaagaagatgaagaagtcatccggggaaattgtgtactgtgggcaggtgtttgagaagtcacccctgcgtgtgaagaacttcggcatctggctgcgctatgattcccgaagtggcactcacaacatgtaccgagagtaccgggacctgaccactgccggcgcggtcacacagtgctaccgagacatgggtgcccgacaccgtgcccgtgcgcactccatccagatcatgaaggtggaagagattgcagctggcaagtgccgccggccagctgtcaagcagttccacgactccaagatcaagttcccattgccccaccgtgtgttgcggcgccagcacaaaccacgcttcaccaccaagaggccaaacaccttcttctagacaccagagacccactgaataaaag

SEQ ID NO: 1518 - DNA, 907 bp, Rattus norvegicus
tctttccgttcccagcgcagcatggctcgtggtcccaagaaacatctgaagcgcgtagcggctccaaaacactggatgctggataagctgactggcgtgtttgctcctcgtccatccactggtccacacaaactgagggaatgcctgcctctgatcattttcctaaggaacagacttaagtatgccctgactggagatgaagtaaaaaagatttgcatgcagcgattcattaagattgatgggaaagtcaggaccgatataacctaccctgctgggtttatggatgtcatcagcattgacaagactggagagaacttccgtctgatctatgacaccaagggtcgctttgctgtccatcgaattacacctgaggaggccaagtacaagttgtgcaaagtgagaaagatctttgtgggcacaaaaggaatcccacatctggtgacccatgatgcccgtactattcgataccctgatcccctcatcaaggtgaatgacaccattcagattgatttggaaacaggcaagataactgatttcatcaagttcgacactgggaacctgtgtatggtgactggaggtgctaacttggggagaattggtgtaatcaccaatagggagagacatcctggctcttttgatgtggttcatgtgaaagatgccaacggcaacagctttgccactcgtctttccaacatttttgttattggcaagggcaacaaaccgtggatttctcttccccgaggaaaaggaatccgccttaccattgctgaagagagagacaagaggctagcagccaaacagagcagtgggtgaaatggtctctaggagacatgctggaggagtatttgtacctcaacacaacaagcctttctaagcaacatgctagattaaacagcatgatgaaatc

SEQ ID NO: 1519 - DNA, 1353 bp, Rattus norvegicus
cagcagcagcagcagcagcagcaccagcagcacttgggggaaaagctagaggctagagtcatggatgaccagcgcgacctcatctctaaccatgagcagctgcccatcctgggccagcgtgctagagccccagaaagcaattgcaaccgtggagtcctgtacaccagtgtctctgtcctggtggctctgctcttggctgggcaggccaccactgcttacttcctgtaccagcagcagggccgcctggacaagctgaccgtcacctcccagaacctgcaactggagaaccttcgcatgaagcttccgaaatctgccaaacctgtgagcccgatgcgcatggctactcccttgctgatgcgcccactgtccatggataacatgctccaagcgcccgtgaagaatgttaccaagtatggcaacatgacccaggaccacgtgatgcacctgcttacgaagtctggacccgtgaactacccacagctgaaggggagcttcccggagaatctgaagcaccttaagaactctatgaatggtctggactggaaggtctttgagagctggatgaaacagtggctgttgtttgaaatgagcaagaactccctggaggagaagcagcccacccagactccacctaaagtattgaccaagtgccaggaagaagtcagccacatccctgatgtccacccgggggcgttccgtcccaagtgtgatgagaacggtaactatatgccactccagtgccatgggagcactggctactgctggtgtgtgttccccaacggcactgaggtccctcacaccaagagccgcgggcgccataactgcagtgagccactggacatggaagacccatcttctggcctgggagtgaccaagcaggatatgggccaaatgttcttgtgaagacagaagccagctctgcacggcggcagctcccctgctcctcagcccttcttacactccctaacatcacaccccatttcccgtcttcctgcaccctggggcttgagactggtatctgcttcaccgtccctggacacaacaaatgaaaccggaacagaatgagaacactggagggagggccttgctgcctacccccatctaagggacccccatttctgacccattagcagtctttaatgtggggctctgagatctaggcccactgacagggataggggatgccctacccttaatctaggctggatacatttgctgtcttctcaaggaagaggccaagccctcccagcaacccttcctcatgtcctgccgacgcccctgggatccctgctcagccaagcttgtcagcagcctgtaggaccatggttcacgtgacaataaaaggtagaaggt

SEQ ID NO: 1520 - DNA, 7727 bp, Rattus norvegicus
acgccagggaccgagagcgccgagacggaaagtagtcctcgcagcggggaacgcgcgtgcgcgtgcgcgtgcccggcagcagcttcgccgggctctgtggaagggggcgaacctcagggtcctgacgcggagggatccgtagaagccgcagtgcagcgggagcgcgcgagccagctggggcggggccaggcgaggcggggcgcgcgcggcggccgttgagggaccgttggggcgggcggcggtggcggcggcgcgcgctgcgggcaaagagtgtggagccggacgcgcggcagagctcgagctgctgcagctgctgccgccgccagagtaacctcgatccccgagctccggataccggtgcctcgccatggtgagtgaggcggccgaagtcgggtagagacccccgagatggcgagcgaaccctgggagggagaggccgggtccctcgggacctcccatgcggcccttgggacttctagaagcggttttagctgcagatggaattggtaggacccccaaacagacagtctgaggcttcaaatggagagcaccaggacatccccacccccccaccccccaggcagcattcggatccctcacggggcgattcgtcttagaatcacatccacccgatacccgggaggaggaaatgggaaacgccggcgatgaagactttggggtagcagagcctgagtgtgagaaggagaccgatcggtccctagggagtgttctgcagagaggatagatggggatcctgggtcacttctgcacactagaccccggtgggggaggggtctccaaggacaagcattgacgaggaggagggtcaggtgcaggctgaggtaaggaggagcccgaggtgggtggcatcagaggctagaagatgctcttgcagcctgtgaggagccagggggggactgaggagagttgggggggttcatagaaatgtcttaaaggaatgggaatgtaatcacaggtagtgggggggaaccagggacccttgtggagaacttggttgggggtagctaagaagggttctgttgtttgggttgttgcactagagaggttgggttggtaaggcgtgttttgtttgggtcagagaaaacggggtttccaaggtgagggatgggggaggacttgagtttgggtggtaggggtgaggttggacaggcctctagagaagtgtaggagacaatggatgttagctaggtaggactaggtttagaggtgggtgtctccggggaaaggtcctgacacaaagactggtgagtcgggcttggcaatgggctgcagcagaaaacctaaaggagtagtcagacgtgtggtcccctctccttgggaagaatggggctgggccaggctcaaggcaccgaggcagtgggagcaggtgggcggagttgttcaggtccctattgcgcactgaagctgcatgaaatcagagtggggtcaaagtttggggtgcatcaagtgagctctcttgcttaagccaggaagcctggccccctcattgtcccttctagatcaggaggactgcctttctcctccagcttcatgcacctgcttctcctcactgtgccaaatgacagtgcaatgcagtacagtgtggtgtcagtgacagacgcccagttacatccctcagggtgggggctgcagtgcttgtcagagaagacctctgaggaccctgtcattgactctagggccacttgtcctttccatgcctcttccccagcttccacagttaaagcttctagaagcaaaatagcagattacttctccctggtcctgccacccacaacacccccagcccccccctccccgggctgatgagctgggaacctcgtgcaccaccctccctggcaaagctggggaggacaggcagccgccaccgtgtatcagatctcatactgctgacacagacctgagggctcttcttgccaccaccccatttccccccagcagaaccttgctaaaggggccctgcagcttgggcagctgccagcatccccactccccacctccaaaggagggtctcagctttggccctgagcaggttttctcttcctgttcatattcagcaaggcgtggagggaagagtcagcccctggtaaccggccttggactttggcctgagctctggctcctccttggccctgggtgaggggccctggccttggtttctgagctcatttgacactgctttctggcacctgctgggggctggggcaaaacagagaaataattccctcttccctcctcacctcaaggtgattttttctgcccagcccctctctggaccctgaggtgaaggttcagagacctggaggcatgcggcttactgtgtggtgaaggctaacagtctagtctgggaaggccaccagtgagctggtcttgctgcctgggccatccgttttccaggccagcagccccaccgtggtctctgcggcctttccttggtgaacaggggaagggctcctggatgctggggagagtgtctgacaggcccttgtagagccagagccacgcctatttgcagcacccgtgacagtgcctctgcagctcccagctctttggggagagatggcacagagcggcctccagagcctgccttggccattccgcagcctgcctggcctccttgcccctaccgccggttattgtcaccgagagggaaagggaacagggcttcttgcagacatcactgtgtgatgggaaggtccctgagtgggccgacttttcctagcctaggcccgtggaagagaatgagaagcagatgggctccatagccgtcctccccactgctcctcccgctccttcctcccctcccccagcacaggctggcctcggtaaccagaagcccattctcttctcacttgctggaagcagccagcagcagtgtcctcaggtgtcagaaccaagaggtgggcctggttgccttcaccggccctcaggctcaggccaccaggttagtgttaggaagcccaccgctctgagccatctttgatagctatgcagaagacgacccacccatttggcctttaccatttctttctttacatcttccttctccccaccccaccccctctgcaggcacctcctcccatctgtcctcatcacttgattctcctccggtactgcctgttcggggcttggtctctagtctctagttcctcttcctctacattagatgatacccctgcccctcccattgcatcctttatggatatagaatgggggagagtgaggtctttaagaccagctcaaggggtgggggcaggtgatagtttgccacctctgctgggacttccagagccttcgtacaatgatgcaccatggagctgccatagttcacttccatttctgggactcccaagctcaggccaggatcccactgtggccatggtaccccttcccctcatggggaaaggaaggaagcatcatctggactacagtgaccccaagacagaggagattggggggggtacacacacaaagaaaactggccttattaactgttcaaagcttgaagtttggatgcagctcccgtttcgcccctccctctaggacctccacaccccaagataaccagggctccagtaaaggaaaagctgagagctgtgtctcctccaggaaaccctagatgtagtaggactgtctgcatggctggccaggcctcaagtaacccagactaaaaagggttaaaaactgcagtgctgaatctggaaaggcgaagcaagcagatttcagttctttgccaccattgctgcctgctgcagtcccctccctgccacttggtcctcttgtccaaaagtcacagaatagaacagtgtgctgcacctgccctgcatataagtgggcagagtcgtctcctgcctgaccagggttctctaaggagcaacttagagacaccaactagaagagatcttgccatttggagccacactgcctggacctagttcccccaaataggtgacagagaaactagcaaagacagccccagaaggcttccctctgccctacccagcggctggcctgtgtgttttggagccttctagagtgcttgatgaggcctctagggcagcggcttcttgcctcagcctctggggctcccagagtgaaacctcagcaccacacgcactgtgtctaggtcgaaccggagcagctctagatgcttccccagcctgcacctgccaggcccgtggtgccagtgaggcccagctagcccaggccctgatctcgacgtgatccttccttgcttcagcaggaatgctttaggaagctggccttggcaaagggggttgggcagggggcggaggccgcattcagggtgggtggataggttggcccagtgacttactcctccctccttttccaggctgaccagctgaccgaagaacagattgcaggtgagtttgtactctgtcccaagccagatcttaactagcccctgcacctcatgaaatgtgtgtccatggggttggggatttggctcagtggtagagcgcttgcctaggaagcgcaaggtcctgggttcggtccccagccccgaaaaaaaaaaaagaaaaaaaaatgtgtgtccatcatgtatgtctcatgtcacctcaggccaggtctgtggcttgcatgttggtatgtgtgtggagaagagcttagccaggaactgccacacctaccccatagccctgccacagaccttagccaggctctgcaggggctgtctgccctccctcagtatagctcacttggggccttgaagtggatctcttattgcaggacctatccagttgtcgccctcccccacccccgtgccccgttccagccagactgagaaggtgcccaccgcctctcttacagtaggctggccaccgttgtgtacccccagaaggtggctggccacaaccctctctacttgctcacttgcttccttctaccagagctcagctaccctgaccccaactcaagctggcagcccctttccctccctccctccctccctccctccctccctccctcactgcctgtgggggcgcgtctgatgggccacaggcgttccagtttttctgttgttgcctggcaccaggaatcagttcctagagcacaggacttggttttgttgattgctgccatatcttcaatgcctggtgcatagtaggtgcgccataaatcctttcggcataaacaataagcacacacctcccgtgagctaaaagaaattccctagaccctctgtgacttttgtagctctgccccccacccaagctcctggaagactggctacagggctgatggagccatgggctatgtttctgtgcttttgcccctccgcagcctgtgctaccagaggcctggggccactcctgctgtatctgtctcctaacagtgggttgctacagagctgaccagaggccaaagtgagagaaaaggtctctgcccatagctttgcctgctctgtgacctgggtgctatacaagtacctgctttctcagagtcacactttgacactaagcaggtagagacccaccaagaaaagcttgtctatttgttggtcatggtatcatgggtcacatgactcactctcaactggtacttccccctccccccctgcagccaggtctcagcacagggaggtgacagcatcccctaggagacttggactatttccccagagcccaatagctcaggtcacagctgcccagcagtgtgtgtcctttcctcccaactcacctgccatccccaatctggctgtcctgtaaacacaaatacacacctcacttttcaccctgtgcccattagcaaaacgtccaccactcccctccgtcaccacccccagcccacaccctctgggaacaggctgcaagacatctgctctcagagactttgggggtggggagctctgggtgccaaagtgggcccagtgggagggcaggagccacatgcttctctcccctctcctgatgcggcccagctgcggccttcctacacggcaccacgctccctatccttctggcctgacagccatcccctttgcatcccatgcctctccccacactgcccattagccaagccctgctgcagaccaccccacacgtcactgcccccacaggcttggctcctccccaggaagctggtagcgcccacagctggggactgggctggcagtgccaacagaaggaattcaacgccataattccttttgaggctggccagaagcctctgcagcctcccctttccctcctgccagttgaccttggctggtgaacttcagatgaagaatcgtcttcggagctggggatttagctcagtggtagagcgcttacctaggaagcgcaaggccctgggttcggtccccagctccgaaaaaaagaaccaaaaaaaaaaaaaagaatcgtcttgagacttacccactccataactttggtccagtgtatcatcatttgagagaggcccaagccagagaccaagaagaaatgagtccgaggagggagctgtcaggctgcatcactcagctcgatgggcagaggagatgatcagcttcttgtgctacagagtggagagcgacagagcagcactgcaggaaaggggctctaacctgccatgttccttcccttccccagagttcaaggaagccttctccctctttgacaaggatggagatggcaccattaccaccaaggagctggggactgtgatgagatcgctggggcaaaaccccactgaggcggaactgcaggacatgatcaatgaggtggatgctgatggtgagtgtgttcccactgactcagtgaccccaaaacccttctagagggctccaggtgacccctgcctcctcctttcccctctgctaggcaatgggaccattgacttcccagagttcctgaccatgatggccagaaagatgaaggatacagacagcgaggaggagatacgagaggccttccgtgtctttgacaaggtaagcagtcaccctatgacagacgccccccataccccctgccctttcagaatcccttcacccagtatggggagggaggtggcaggtgacggatgacagaggagcctcagtgacaagcctttatccccaaaccccaggatgggaatggctacatcagtgctgctgagctgcgtcacgtcatgacgaacctgggggagaagctgactgatgaggaagtggatgagatgatccgagaggcggacattgatggagacggccaggtcaattatgaaggtgtgttgtgttgggcacaccttccatgctgaggggacggtggggctcggcgtgtgcaggactcaaccccgtttgttatctcttggcagagtttgtacagatgatgactgcgaagtgaaggcccgggcagctggccatgcccgttctcctgatctcttcttgcgctctcctctcttcaacactcccctgcgtacccggttctagcaaacgccaattgattgactgagaatctgataaagcaacaaaagatttgtcccaagctgcatgactgctctttctccttcctcctgactgtccctccatgccctcattgcttcctttggccttccccctccattcccagtctccaggcctgatgcaattcacaaggtgaaccccattgccctgccctggggagcctctgccctctctgcaagccggatggctctcctctgttttttgggtttgcttcctttgttgcccttctttggtgacgggtggcacattgtctgcctgacggaggaga

SEQ ID NO: 1521 - DNA, 851 bp, Rattus norvegicus
cgagcggatgcccaaaggaaagaaggccaaggggaagaaggtggccccggcccccgccgtggtcaagaaacaagaggccaaaaaggtggtcaatcctttgtttgagaaaaggcctaagaacttcggcattgggcaggacatccagcccaaaagagatctcacgcgcttcgtcaaatggccccgctacatcaggctgcagcggcaaagagccatcctctataagcggctcaaagtacctcctgccatcaaccagttcacccaggccctggacaggcaaacagcgactcagctgcttaagcttgcccacaagtacaggccagagacaaagcaggagaagaagcagaggctgctggcccgcgctgagaagaaagctgctggcaaaggggacgtcccaactaagagaccacctgtcctccgagcaggggtcaatacagtcaccactttggtggagaacaagaaggctcagctggtggtgattgcccatgatgtagaccccattgagctggtggttttcctgcctgccctgtgtcgaaagatgggggtgccctactgcatcatcaagggaaaggccaggctggggcgcctggtccacaggaagacatgcaccactgttgccttcacacaggtgaactcggaagacaagggtgctctggctaagctggtggaagctattaggaccaattataatgacagatatgacgagatccgccgccactggggaggcaacgtcctgggtcctaagtctgtggctcgcattgccaagctggaaaaggcaaaggctaaagaactcgccactaagctgggttaaatgtacacttaagttttctgtacataaatataattacaaagtt

SEQ ID NO: 1522 - DNA, 1058 bp, Rattus norvegicus
ctctcgccaggcgtcctcattagagtgacatcgtctttaaaccccgcgtggcaatccctgacgcaccgccgtgatgcccagggaagacagggcgacctggaagtccaactacttccttaagatcatccaacttttggatgactacccaaaatgcttcattgtgggagcagacaatgtgggctccaagcagatgcagcagatccgcatgtccctccgcgggaaggctgtggtgctgatgggcaagaacaccatgatgcgcaaggccatccggggccacctggagaacaaccccgctctggagaagctgctgcctcacatccgggggaacgtgggctttgtgttcaccaaggaggacctcaccgagattagggacatgctgctggccaataaggtgccagctgctgcccgagccggtgccatcgccccgtgtgaggtcacagtacctgctcagaacaccggtctggggcccgagaagacctctttcttccaagctttgggcatcaccactaaaatctccagaggtaccattgaaatcctgagcgatgtgcagctgataaagactggagacaaggtgggagccagcgaagccacactgctgaacatgttgaacatctcccccttctccttcgggctgatcatccagcaggtgtttgacaatggcagcatctacagcccagaggtgctggacatcacagagcaggccctgcacactcgcttcctagagggtgtccgcaatgtggccagcgtctgtctgcagattggctacccgactgttgcctcagtgcctcactccatcatcaatggatacaaaagggtcctggctttgtctgtggagactgactacaccttcccactggctgaaaaggtcaaggccttcctggccgatccatctgcatttgcggctgcggcccctttggctgctgccaccactctggctcctgcagctgctgccccagccaaggtcgaagcaaaggaagagtcggaggaatccgatgaggacatgggattcggtctcttcgactaagcccctcacaccaagtcagcctgctttatttgag

SEQ ID NO: 1523 - DNA, 3720 bp, Rattus norvegicus
ccaagttgttcactcttctcatctacctacctctaccaagtctgtgctgccaacctaacttctccgcagggaaaaagtctcattcaaccgaactccgcggccaaatgactagttcctaaacaggatgccgtatgcggggaccggagtcagagggtgacacatgccgcgaagtagtcaaaactgcctattagggcgcttgaaagaagctaaaccaggaaagcggagagagaagcttggaccgaggccgggcagcgggtccgagcaagggaggtggctcgggggccgtgcttctcgcactcgggggaaagccacccgcctcccgggtaagcaccgcgcacgcagccttcccccgccgcgcactcctccgagacgcgcgaggggaaaaactcgcacccgcccaacttcacagtccccgccctggaaccacccgcacccagctccggtccccgctgcaggaacagcagaggcggaaagacgagagccgatcccagccgttcttttttcgatgcaaccgtctcagaaagaatttcgaccccgggagccttcgggaggccagcgccctttccgtgctgcctctgcgcgccccgccccgcgccggccccagcgccacactcttcgggttccgcgctgttcattgggcatctgccccgccaatctaaaagatgtcaacgaatcacgctttataaaaggcaaagagagaggggaaagggggcttttcacgctggctcccttggcgcgagcttaacgcccccaagcggctggaggcactgggcggggctcatttgcataacggccgccccttggtctccctgctgggggctggagtcccgctctcacccacctagatatctgttggaccaccggctggtcactccgaccaggcaagcctgtgggatcgctggacgggttggacgggcgggcccggggaccgattggctctgagagtttccagaaggcagggggtggggtgggaggacgactataagacggagaagccagcagggggatccgggagacgctagtcgcgctcgtggagagcagtgcgaagcgaccgttggctcgggtcccggcttgcctctcctgactctttcgtcctaacgttgctttgcctgtttttcagtcaggatgtccgcccgcggcccggctatcggcatcgacctgggcaccacttactcgtgcgtgggggtcttccaacatggcaaggtggagatcatcgccaacgaccagggtaaccggaccacccccagctacgtggccttcaccgacaccgagcgccttatcggcgacgccgccaagaaccaagtggccatgaaccccacaaacaccatcttcgacgccaagcggctgatcggacggaagttcgaagacgccacggtgcagtcggatatgaagcactggccgttcagagtggtgagcgaaggtgggaagcccaaagtgcaggtggaatataaaggggagatgaagaccttcttccctgaggagatttcttccatggtcctcactaagatgaaggagatcgccgaagcctacctggggggcaaggtgcagagcgcagtcatcactgttcctgcctatttcaacgactcgcagcgccaggccaccaaggatgcgggcaccatcaccggtctcaatgtattgcgtatcatcaacgaacccacagcagcggccatcgcttatggcctggataagaagggctgcgcgggcggcgagaagaacgtgctcatctttgacctgggcgggggcaccttcgatgtgtccatcctcaccatcgaggatggcatcttcgaggtcaagtccacggccggcgacacccacctgggtggcgaagacttcgacaaccgtatggtcagccacctggcggaggagttcaagcgcaaacacaagaaggacattgggcccaacaagcgcgctgtgcgccggctgcgcaccgcctgcgagcgcgctaagcgcaccctgagctcgtccacgcaggccagcatcgagatcgactcgctgtacgagggcgtggatttctacacgtccatcacccgcgcccgcttcgaggagctcaacgccgatctctttcgagggactctggagccggtggaaaaggcgctgcgcgatgccaagctagacaagggccagatccaggagatagtgctggtgggcggctctacccgcatccctaagatccagaagctcctgcaggatttcttcaacggcaaggagctgaacaagagcatcaatcccgacgaggcggtggcctacggcgccgctgtgcaggcggctatcctcattggcgacaagtctgagaacgtgcaggatctgctgttactcgacgtgactcccttgtcgcttggcattgaaacagctggcggtgtcatgaccccactcataaagagaaacaccaccatccctaccaagcagacgcagaccttcactacctactcagacaaccagagcagcgtgctggtgcaagtgtacgagggcgaacgggccatgaccaaggacaataacctcttgggcaagttcgacctaactgggatccctccagcaccccgcggcgtcccccagatcgaggtcacctttgacatcgatgccaacggcattcttaacgtcactgctgcagacaagagcaccggcaaagaaaataaaatcaccatcaccaacgacaagggtcgtctgagcaaagacgacattgaccggatggtgcaggaggcagacgggtacaaatcggaagatgaagctaatcgcgatcgcgtggcagccaaaaacgcggttgagtcctatacctacaacatcaagcagacggtggaagacgagaaactgaggggcaagattagcgagcaggacaaaaacaagattctcgacaagtgtcaggaggtgatcaactggcttgaccgaaaccagatggcagagaaagatgagtacgaacacaagcagaaagagcttgagagagtgtgcaaccccatcatcagcaaactttaccaaggcggtccaggcggcggcggctcctctggaggacccaccattgaggaagtggactaggcttgcgctggagtccgcgtaaacctcttttcctttctttcttttcttttctttttctttttctcccttttgttttggtttctttgaaatgtccttgtgccaagtaagatctgttgttggaagtctttagcctggtgcatacatatgaaaggaaaggtgcaacaacttagtttagttataaaaagttagttctaaagtttgatttgggggaaaaatgaggtttctctttaatgcatttagagcgattgctgatttgagcttttgttgttgttgttaagcttaagtatgtacgtggagatttgcttgaaatgagaaacctgatgtttgcacacctgtcctatggaagcttggttacactaagatacagagaagcttgaattatttttatgtactatgagatgaaagtaaacactgcggtaataaagacaggtatattctgtaaacacataaatgcacattcaaagtaaagctgaaattgatctcaaaattgctgtctgctgttttcagtctcttatgtttgactcacgtcgctctttaagaaaatgtgctgtgaagtttgtctaatccacttttctctaattctcagacgaagcgcctgcctcaaatcaccaatttaaggggtgaagaatcttggttaacctttagcatacagaacctgatggggtctttcagtgaatctaaactcctaagtcc

SEQ ID NO: 1524 - DNA, 5925 bp, Rattus norvegicus
ccgctcagtcatggcggatcgagagatggctgcatttggggccggagcccccttcctgcgaaaatctgagaaggagcggctggaggcgcagaccaggccctttgacctcaagaaagatgtttttgtgcctgatgacaaagaagagtttgtcaaggccaagatcgtgtctcgagagggtggcaaagtcaccgctgagacagagaatggcaagacggtgactgtgaaggaggaccaggtgatgcagcagaaccctcccaagttcgacaagatcgaggacatggccatgctgaccttcctgcacgagccggctgtgctctacaatctcaaggagaggtacgcttcctggatgatctacacctactcaggcctcttctgtgtcaccgtcaacccctataagtggctgccagtgtacaatgcgcaagtggtagctgcctaccggggcaagaagaggagcgaggctccaccccacatcttctccatctctgacaacgcctatcagtacatgctgacagatcgggagaaccagtccatcctcatcaccggagaatccggagctggtaagaccgtcaacaccaagagggtcatccaatattttgctgttattgctgccattggggaccgcagcaagaaggaccagaccccaggcaagggcaccttggaagatcaaatcatccaagccaaccccgctctggaggcctttggcaatgccaagacagttcggaatgataactcctcccgatttgggaaattcattcgaatccattttggggcaacaggaaagttggcatctgcagatatagagacctaccttctggaaaaatccagagttattttccagctgaaagcagaaagagattatcacattttctaccaaatcctgtctaataaaaagcctgagcttctagacatgctgctgatcaccaacaacccctacgattatgcgttcttctcccagggagagacgactgtggcctcaatagatgactctgaagagcacatggccaccgatagcgcctttgatgtgctgggcttcactccagaagagaagaactccatttacaagctgacaggcgccatcatgcactttggaaacatgaagttcaaacagaagcagagggaggagcaggcagagccagacggcacggaagaagctgacaagtcagcctacctcatgggactgaactcggctgacctgctcaaggggttgtgccaccctcgagtcaaagtgggcaacgagtatgtcaccaaagggcagaatgtccagcaggtggcatatgccatcggggcactggccaagtcagtgtacgagaagatgttcaactggatggtgacacgcatcaacgcaaccctggagaccaagcagccacgccagtacttcataggtgtcctggacatcgccggctttgagatctttgatttcaacagctttgagcagctgtgcatcaacttcaccaatgagaagctgcagcagttcttcaaccaccacatgttcgtgctggagcaggaggagtacaagaaggaaggcatcgagtggacgtttattgacttcggcatggacctgcaggcctgcatcgacctcatcgagaagcccatgggcatcatgtccatcctggaggaggagtgcatgttccccaaggccacggacatgaccttcaaggccaagctgtacgacaaccacctgggcaagtccaacaacttccagaagcctcgcaatatcaagggaaagcaggaagcccacttctctctgatccactatgctggcaccgtggactacaatatcctgggctggctacagaagaacaaggaccctctcaatgagacggtggtggggctgtaccagaagtcctccctcaagctcctaagtaatctgtttgccaactatgctggagctgatgcacctgtagacaagggcaaaggcaaagcaaagaaaggctcatcctttcagaccgtgtccgcactgcacagggaaaatctgaacaaacttatgacaaacctgcgctccacgcaccctcactttgtacgctgcatcatccccaatgagacgaagtctccaggggtgatggacaaccccctggtcatgcaccagctgcgatgcaacggagtgctggagggtatccgcatctgtaggaagggcttccccaaccgcattctttatggggacttccggcagaggtatcgaatcctgaacccagcagccatccctgagggccaattcattgatagccggaaaggggctgagaagctgctgggctccctggacattgaccacaaccagtacaagtttggccacaccaaggtgttcttcaaggcggggctgctggggctgctggaggagatgcgagatgagaggctgagccgcatcatcaccagaatccaggcccagtcccgaggtgtactttccagaatggagtttaagaagctgctggagcgcagagactccctgctgattatccagtggaacatccgcgccttcatgggggtcaagaattggccgtggatgaagctctacttcaagatcaagccgctgctgaagagcgcagagacagagaaggagatggccaacatgaaggaggagttcgggcgagtcaaagatgcactagagaagtctgaggctcgccgcaaggagctggaggagaagatggtgtccctgctgcaggagaagaatgacctgcagctccaagtgcaggcggaacaagacaacctggcagatgccgaggagcgctgcgaccagctgatcaagaacaagatccagctggaggccaaggtgaaggagatgaccgagaggctggaggacgaggaggagatgaacgccgagctcacggccaagaagcgcaaactggaagacgagtgctcagagctcaagagagatatcgatgacctggagctgaccctggccaaggtggagaaggaaaagcacgcaacagagaacaaggtgaaaaacctgacagaggagatggctgggctggacgagatcattgtcaagctgaccaaggagaagaaagctctacaagaggcccaccagcaagccctagatgaccttcaggctgaggaggacaaggtcaacactctgaccaaggccaaggtcaagctggagcagcaagtggatgatctggagggatccctggatcaggacaagaaggtgcgcatggacctggagcgagcaaagcggaagctggagggtgacctgaagctgacccaggagagcatcatggacctggagaacgacaagcagcagttggatgagcgactcaaaaagaaggactttgagttaaatgcactcaacgccaggattgaggatgagcaggccctgggcagccagctgcagaagaagctcaaagagcttcaggcacgcatcgaggagctggaggaggagctggaggctgagcgcacagcccgggccaaggtggagaagctgcgctcagacctgtcccgggagctggaggagatcagtgagaggctagaggaagccggtggggccacatctgtgcagatagagatgaacaagaagcgcgaggccgagttccagaagatgcggcgggacctagaggaggccacgctgcagcatgaggccacagctgcggccctgcgcaagaaacacgcggacagcgtggccgagctgggcgagcagatagacaatctacagcgggtgaagcagaagctggagaaagagaagagcgagttcaagctggagctggatgacgttacctccaacatggagcagatcatcaaggccaaggctaacctggagaagatgtgccggaccctggaggaccagatgaatgaacaccggagcaaggctgaggagacacagcgttctgtcaatgacctcacccgccagcgggccaagctgcagacagagaatggggagctgtccagacagctggatgagaaggaggctcttatctctcagctgacccgaggcaagctcacgtatacccagcagctggaggacctcaagaggcagctggaggaggaggtcaaggccaagaatgccctggcccacgcactgcagtcagcccggcatgattgcgacctgctgcgggaacagtacgaggaggaaacagaagccaaggctgagctgcagcgtgtcctgtccaaggccaactcagaggtggcccagtggaggaccaagtatgagacggacgccatacagaggacggaggagctggaggaagccaagaagaagctggctcagaggcttcaggatgctgaggaggcagtggaggccgtcaacgccaagtgctcctcgctggagaagaccaagcacaggctgcagaacgagatcgaggacctgatggtggatgtggagcgctccaatgcggccgccgcagccctggacaagaagcagaggaacttcgacaagatcctggttgagtggaagcagaagtatgaggagtcccagtcagagctggagtcttcccagaaggaggcgcgctccctgagcacagagctcttcaagctgaagaatgcctatgaggagtctctggagcacctggagaccttcaagcgggagaacaagaacctccaggaggagatctcagacctgactgaacagctgggctcaactgggaagagcatccacgagctggagaagatccgaaagcaactggaggctgagaagctggagctgcagtcagccctggaagaggctgaggcctccctggagcatgaggagggcaagatcctccgagcccagctggagttcaaccagatcaaggcagagatcgaaaggaagctggcagagaaggacgaggagatggagcaggccaagcgcaaccacctgcgggtggtggactccctgcagacctccctggatgccgagacgcgcagccgcaacgaggccctgcgggtgaagaagaagatggagggcgacctcaacgagatggagatccagctcagtcatgccaaccgcatggctgctgaggcccagaaacaagtgaagagcctccagagtttgctgaaggacactcaaatccagctggatgacgcagtccgtgccaatgacgacctgaaggagaacatcgccatcgtggagcggcgcaacaacctgctgcaggcggagctggaggagctgcgggccgtggtggagcagacggagcggtctcggaagctggcagagcaggagctgatcgagaccagcgagcgggtgcagctgctgcactcccagaacaccagcctcatcaaccagaagaagaagatggatgcagacctctcccagctccagacagaggtggaggaggcggtgcaggagtgtaggaacgcagaggagaaggccaagaaggccatcacagatgccgccatgatggccgaggagctgaagaaggagcaggacaccagcgcccacctggagcgcatgaagaataacatggagcagaccatcaaggacctgcagcaccggctggacgaggcagagcagatcgccctcaagggtggcaagaagcagctgcagaagctggaggcccgggtccgggagctggagaatgagctggaggctgagcagaagcgcaatgcggagtcggtgaagggcatgaggaagagcgagcggcgcatcaaggagctcacctaccagacagaggaagacaggaagaacctactgcgactgcaggacctggtggacaagctgcagttaaaggtgaaggcctacaagcgccaggctgaggaggcggaggaacaggccaacaccaacctgtccaagttccgcaaggtgcagcacgagctggatgaggcagaggagagggcggacattgccgagtcccaggtcaacaagctgcgggccaagagccgtgacattggcgccaagggcctgaatgaagagtagatcttgtgctacccaaccctaaggatgcctgtgaagccctgagacctggagcctttgaaacagcaccttaggcagaaacacaataaagcaattttccttcaagccaa

SEQ ID NO: 1525 - DNA, 1454 bp, Rattus norvegicus
gtctctccgccatggcggccctgcgtgctctgctgcccagagcctgcaactcgctgttgtccccagttcgctgcccagaattccggcgcttcgcctcgggtgctaactttcagtacatcatcacggaaaagaaaggaaagaatagcagcgtggggctgatccagttgaaccgtcccaaagcactcaatgcactttgcaatggactgattgaggagctcaaccaagcactggagacctttgaggaagatcccgctgtgggcgccattgtgctcactggtggggagaaggcctttgcagccggagctgacatcaaggaaatgcagaaccggacatttcaggactgttactcaggcaagttcctgagccactgggaccatatcacccggatcaagaaaccggtcatcgcggctgtcaatggctatgctcttggtgggggctgtgaacttgccatgatgtgcgatatcatctatgctggtgagaaagcccagtttggacagccagaaatcctcctggggaccatcccaggtgcagggggcactcagagactcacccgagcagtcggcaaatcactagcaatggagatggtcctcactggtgaccgaatttcagcacaggatgccaagcaagcaggtcttgtaagcaagatttttcccgttgaaacactggttgaagaggccatccaatgtgcagaaaagatcgccaacaattccaagatcatagtagccatggcgaaagaatctgtgaatgcagcctttgaaatgacgttaacagaaggaaataagctggagaagaagctcttctattccacctttgccactgatgaccggagagaagggatgtctgcctttgtggagaaaaggaaggccaacttcaaagaccactgagagctggcagccatacctttctccaccctggagaggaaagctcagcctgtcagagggtagtagtgtctgccacagttcctaccgaagcttcaaggctgtggccacagcttgggtactcctggtgtggcctgcaaccttcaccagttgttggaagtcggtctctcacagttttctaaatcagaaatctgggaagctttcagggtgtcttgatttgtttaacttcactctaaaggcagggcacgcttgggccagccacttccctgtgcactatctgcagtgcatagctcaagatgtgagcttcaagagggaagtggccctgcctgctgattccaagcacgagaattcaatgaaagtaactccttcggtttagtttcgactcgcctgtagttgtctctctagagggtcaatatgttttttaattattattgctatgattttcttatgggtagggttttgctgtgtatccctggctgcctggaagttactgtatagaccaggttgaccttgaattcacagagatcaaccagcctctgcttcccaagtattgggattaaaggtatatgctaccac

SEQ ID NO: 1526 - DNA, 1087 bp, Rattus norvegicus
  misc_feature (1)..(1087): n = a or c or g or t
caggccagtctgggggtgaggaaaagggggtatttctctcacggctctgaggttcaggcaggcacttaaaagatatttctgacctacagctcacaacaactaccaggcccagtccgctgtccccctgcggcacgagacccacggtggggaagatgtggcggtctttgccaagggccctatggctcacctgcttcacggcgtccatgagcagaactacatcccccacgtcatggcgtatgcctcctgcattggagccaaccttgaccactgtgcctgggccagctctgcgagcagcccctccccnggngccctgctgcttccactggctctgttccccctacgcaccctgttctgagggcccaggtcccacaagagcccacaatggacagccggctcccctccctttgtggcctgccacctggccgcccacactcaacggggaggcccaggcaacctcgagcaggaacagaagtttgctacctgcctcacttccgcccggaaccctccgtgggtcggattcctggctctgccgttgtttctctattcactgccttttggccagcagggtgggtttctctcttgggccggcaggacacagactgcgcagattcccaaagcaccttatttttctaccaaatatactctccagaccctgcaaccatcatggaacattccagatctgaccttctctcccctaccccttctctctggaacactgggtcccatagtcacagccagtccctcaacccaaccctccctggagggaagaccaggtctgctcagggtgagactcccaggaagccacctccggggttggctgtctacccagggtggccaggctgggaagaacaacccagccggacaggacgcacacactccccacccagctccagagactcgccaacccttcactgaagcgactcccctgtttggaatagcaaaaaaaaaaaagaaagaaaaaaaagaaaaaaattttaatttctctttttggtgttggttaaaagggaacacaagacatttaaataaaatgttccaaatatttctgaggccagagctgagtctttgtggtcagtgggaaagagaccaa

SEQ ID NO: 1527 - DNA, 1738 bp, Rattus norvegicus
cggagcacagcggccgccgagcactgcgagcgagcggccggcgccacgccagcagccgcctggggccgcaggaagcaccccggggagcggcggcggcgtgtgcgtgtggcgcgggtgcgggcggcggcgcgggagcagggcagagcggcagccggttcgggcgggcggcatcatggacgagaagttgttcaccaaggagctggaccagtggatcgagcagctgaacgagtgcaagcagctctccgagtcccaggtcaagagcctctgcgagaaggctaaagaaatccttacaaaagaatctaatgttcaggaggttcgatgtccagttactgtgtgtggggatgtgcatgggcaatttcatgacctcatggaactctttagaattggtggtaaatcaccagatacaaattacttgtttatgggagactatgtggacagaggatattactcagttgaaacagttacactgcttgtagctcttaaggttcgttaccgagagcgtatcaccatactccgagggaatcacgagagcagacagatcacacaagtttatggtttctacgatgagtgtttaaggaaatacggaaatgcaaatgtttggaaatacttcacagacctttttgactaccttcctctcactgccttggtggatgggcagatcttctgtctacatggtggtctttcaccatccatagacacactggatcacatccgagcacttgatcgcctacaagaagttcctcatgagggtccaatgtgtgacttgctgtggtcagatccagatgaccgtggtggctgggggatatctcctcggggagctggttatacctttggccaagatatttctgagacatttaatcatgccaatggcctcacgttggtgtccagagctcaccagctggtgatggaaggatataactggtgccatgaccggaatgtagtaacaattttcagtgctccaaactattgctatcgttgtggtaaccaagctgcaatcatggaacttgatgacactcttaagtattctttcttgcagttcgatccagcacctcgtagaggcgagccacatgtcactcgtcgtaccccagactacttcctgtaatgaaagtttaaccttgtacagtattgccatgaacaccgtctgttgacctaatggaatcggaagagcagcagtaactccaaagtgtcagaaatagttaacattcaaacttgtttccacacggaccaaaagatgtgccatataaaatacaaagcctcttgtcatcaacagccgtgaccactttagaatgaaccagttcattgcatgctgacgcgacattgttggtcaagaatccagtttctggcatagcgctatttgtagttacttttgctttcttgagagactgcagatctaggatgtaacattaacacctgtgagtccagttgacttccacttagctgtagcttactcagcatgactgtagagaggatagcaaacaatcattggagcttaatgaacatttttaaatgagtaccaaggcctcccctcttgttgtgttctttcagggatactattaatttaattgtatgatttctctgcactcagtttctcccttctcaaatctcggcccgcgttgttctttgttactgtcagaaaacctggtgagttgtttgaacagaactgtctcctcctgtaagatgatgtactgccaagtacgcagtgtttcataataaacttgagactgagaagtcagggttt

SEQ ID NO: 1528 - DNA, 1981 bp, Rattus norvegicus
caacgcggttctgttggtgttcaggttccctactgacttcccttccagtggcagcggcggaggcggcagtggcagcggcaagcactgagcacgtttgggtagttgtccaagatgccgaatatcaaaatcttcagcgggagctcccaccaggacttatcccagaaaattgctgaccgcctgggcctggagctaggcaaggtggtgactaagaaattcagcaaccaggagacctgtgtggaaattggggagagtgttcgtggagaggatgtctacattgttcagagtggctgcggtgagataaatgacaatctaatggagcttttgatcatgatcaatgcttgcaagatcgcttctgccagccgggttactgcggtcatcccatgcttcccttatgcccggcaggataagaaggataagagccgggctccaatctcagctaagcttgttgcaaatatgctatctgtagcaggtgcggatcatattatcaccatggatctacatgcatctcagattcagggcttctttgatatcccagtggacaatttatacgcagagccagctgtcctgaagtggattcgggagaacatatctgagtggagaaactgtactattgtctcacctgacgctggcggagccaagagagtgacctccattgcagaccgattgaatgtggattttgctttgattcacaaagaacggaagaaggccaatgaagtggaccgcatggtactagtaggagatgtgaaggatcgtgtggctatacttgtggatgacatggctgacacttgtggtacaatttgtcatgctgctgacaaacttctctcagctggagctaccagagtttatgccattttgacgcatgggatcttttctggtccagccatttctcgcatcaacaatgcatgctttgaagcagtagtagttaccaataccatacctcaggaggacaagatgaaacactgctccaaaatccaggtgatcgacatctctatgatccttgcagaagccatcaggagaacccacaatggagaatctgtctcctacctgttcagccatgttcctctataatatcataaattctgaagcgttttcaaaatgaaaccacccccaccccttgtttttcttgtatttggtgagttgggcagaagagccagcttgcttcagtgtagctttttacagcccacattagctacattaggatttatcctaattggagaaagacagactgctattaactgctaggacaccctacgtgcattgttgcagcctggctttcttgtttattttgtgatccttgcagctttaaattgagttccactgttgaaagctgcatagactgttaaaagagagagtattccccaaggtccttaggatggaattgtggagctcatactccattgcatgtgaaggctttggagtttccttcattcagaataactagcgacaaagccagccctcgtgtgatacattttcagaggtgtatgctacactgcagcaagttccctgtgcatccttaaacagagttcgcctgctgagcaccctgtacggcaggggcgggtagctcaatgcagtaatcaatttttgggaggaagaagcctgatctattatcatctgtttaattctctgtagcttggattctctatgcctattcctttcctgttggcttcaccttcagctatctcgaccctttcctggacaaatatcttgaactcagtgatcattgtttgtgacaaaattttctgtaagacagacttgcttcttgctatgtaactgctaacgttgacattaggtaacttgctatagcacaatcttccttagcccgctctctctgagttagtgggttttaggtggtgtgtgtgtcgtagtgccttttgattaatttaagtatttaatttttatcttccttcgatctgtttggcttaacaatttgatcttattgtctcatgtagaagaaacttaataaaatgtctgtcatgtgtac

SEQ ID NO: 1529 - DNA, 2697 bp, Rattus norvegicus
aactgtacctgcgttcttcgggaccacccagagcttcaaacactgctgcccagcctgcgtgggcagaagcagaggcccagcaccctccagcgactcttgggctgctcctcctccctctggctcctcccctagcccgccccttccctagatcctgctgccgcgttttcccgcttcaccagcagcggcggccaccgcagcagccgcagcagcagcagccgcagcagcagcagcagcagcagcagcagcagcagcagcagcggcggcggcaactgcagcagccaccgtagcagcagtctgcgtcgcggtcgctttctccttctctggcgcgcttcagtccccgtgagtcaccatgcccaacatcgtgctcttcagcggcagctctcaccaggacctgtcgcagcgcgtggccgatcgcctgggcctggagctgggcaaggtggtcaccaagaagtttagcaaccaggagaccagtgtcgagattggtgaaagtgtgcgaggggaagatgtctatatcatccagagcggctgtggggaaattaatgacaacttgatggagctactcatcatgatcaacgcgtgcaagattgcatcctcatccagggtaacagctgtgataccctgcttcccctacgcccggcaagataaaaaggacaagagtcgtgctccaatttctgctaagcttgtggccaatatgttgtcagttgctggggctgatcacatcattaccatggacctgcatgcctctcagatccagggcttctttgatattcctgtggataatttatatgcagaacctgcagttcttcagtggattcgggagaacatcactgaatggagaaactgtattattgtttctccagatgctggaggagccaaaagggttacgtcaattgcagacagactgaatgtggaatttgctttgattcacaaagagagaaagaaagcaaatgaagtggaccggatggttcttgtgggcgatgtgaaggaccgtgtggctatcctggtggacgacatggctgacacatgtggtaccatctgtcatgctgcagataagttactctcagctggtgccaccaaagtttatgctattcttacccatggaatcttctctgggccagctatttccagaataaataatgctgcctttgaagcagttgttgtcaccaataccattccacaagaggacaaaatgaaacactgttccaaaattcaggtgatcgacatttcaatgattctggctgaggccattcgaagaacccacaatggggaatccgtgtcctatctgttcagccatgtcccgctgtagtctggattggaatattgaagggggagcaagcctcctccaacttctcactgtctttgtctgcctgctgttttagcattaggactcagcaattctaggatgatcactggcaaaagcgtctgatctatgtacactctgagggtcctctgtctcctcaagggcaagactactacttagcagttctgggggagggcagaggaaggtgctggttatttggtctttaaatgaagtgatgtcaatgagaaaatagtcttttccctcattcttttttagtactttgaggcaacaacttttaagcctaaaatcccattgtggaaatttgtcatacatatattttgaggttgccaaaggtgacttcaaatgaaagccttctgtgtaaatatataataaggcctgtggctatttggggaaaatcctaaatagcctttatttcagagagaaccttggaaaatttatactatcatgaattttgaaatttttttaataataacggtttattttattgtcctttatcaggactgaattttattgagtctaagctagtcattgacatactgactttccttagtagatattagacatattgaagacaatataaggctgtaccatttttaatcaccactttgaagatatgtcataactgtcaacttaactaaaactcccagattatgatcagtgatcactgttatttggataccatttcaggatgtagcaatgattttgtggccacctagatgtacaactttgtgtatcccaggggaattactctttaggatgacgctcacgtccatgcatttttccctaataatttcttcttgtagatgtcttccaaaagagagactccttgaaatccccttacattttttggctgattagtattttttttcacatacataaaatagtgaagtgtcgaatgccatcaaatgtatttattcaaaaattgcataattatgcttgagttaaatgttcttcggccctatgtcatcggaagtcctaaatttctaatgactagttatctctaaagctgctaaaatgtagataggagatggctacaaaacagtggctacaaaagtgaatgtctgatccattaaaataaacttcaaagaaatggctcggaaagcttagggaagaagatctcattatggatggtattctttataaaacaatcttttagtgaagtgtggaggtctgtgcggaccacatgtttaaggccagcctgggctatacagtgagttccaacttagcttgggctgcagaattagactgtgtgtcataaaaccaaatgaaacaacaaaggcagttctctatgtcatcattaaaagtggacaacctatcattttccttctcaccaagaagaggatttgcctgtgtacctaaagcttaggaatgctaac

SEQ ID NO: 1530 - DNA, 627 bp, Rattus norvegicus
gagagtgtagataaggtcatggatcagaaagaacataaattgaatgggaaagtcattgatcctaaaagggccaaagccatgaaaacaaaagagcccgtcaaaaaaatttttgttggtggcctttctccagacacacctgaagaaaaaataagagagtactttggtggttttggtgaggttgaatccatagagctgcctatggacaacaagaccaataagaggcgtgggttctgtttcattacctttaaggaagaggaaccagtgaagaagataatggagaagaaataccacaatgttggtcttagtaaatgtgaaataaaagtagccatgtcgaaggagcagtatcagcagcagcagcagtggggatctagaggagggtttgcaggaagagctcgcggaagaggcggtgatcagcagagtggttatgggaaagtatccagacgaggtggtcatcaaaatagctacaaaccatactaaattattccacttgcaacttatccccaacaggtggtgaagcagtattttccaatttgaagattcatttgaagtggctcctgccacctgctaatagcagttcaaactaaattttttctatcaagttcccgaatggaagtatgacgttgggtg

SEQ ID NO: 1531 - DNA, 3105 bp, Rattus norvegicus
aaattaaatctaaggactttcagatttatggctttgatcacactgtttctagagaaatctaaacctggaaggctgagttaagccagacattccagatggctctctcctcatagtccttggaatcacgaaggaagcagggcagagagctaccagaagtagtaaacattgatcacaggctcctagttcatcgtgaccaaatcaaaaggaatgtttctccatggcccattaactgtctgttagtttgaacgtaacatggtgatagccagactggagctacctgagtcctgttccagggaatcttagggcaattacctacataacccttctggacctcaactgcctgatcttagggattaataacatctatttaccagagcgactgcattgtgaagggttccaaacactcctggcacagagtaagcactgtctgggctttggatagaaatctcttctgcaccatgagctcatttataagactttccaggtctggaattgtacaacccaaacagctcatatcaatgtcacaagctcttcggtttggcaaaatgtctgggagtcaccaaatgcagagaatgccatattcaacaaagcctgataaccaaggactcagtggactaattggcagtcctatcccagatccaaggttccttgagccaggggcaagctaggatatgctcccaggtatcttctcccttaggactttaggtttcttggccacttcctcttatttcagtgaaagcagatccactccattgacacttgtggtcacagtctagcacgactgctcccttccttcttttctccctccctgcgcagcttcatttgctcccagtagtggctggaaaaacaccaaattccaatccgcggtttctcccttctacttcctggaaacatccaagggctcggcacttactcagcagattcaaaccttccactttccatcactcatcgaggatgatgctgctccttggcaccaaccaccctgcctgactccaccctctggcttacaataaaaggctgaggcagagccgctagaaatgcagagacacagacagaggccagcccagaaaccagccaactctcactgaagccagatctctcttcctccaccactatgcaggtctctgtcacgcttctgggcctgttgttcacagttgctgcctgtagcatccacgtgctgtctcagccaggtgagaccccagtttccttctccttctagcatttcaccccattttttaattgttgtgggccatcatagtgggccttacctagtaaaatacttttttttttttaccaaggtaaggagcatagagccaacccaattacaggggttgcttctggaaagcaactaggattttaatcgttagatcaaagtttagaatcgcaccttcatacagttcctgctcccctatttcctgagtatttgagaacctggttgatcaaagaagggcttgggttggttcatttttccagatagaggagaatcaggaagagacccaggatcttgatctatgtttcaccagcttccagagatagcagctcagcagaggtagttggtatcagagatactcatgattcgatatagggtttttttttgtaacctatagtaatgtactcggtaatcttctcagaccctagtaatttgacttctaactaccctcaaatgacagtccctagctttaatggcatccctctgtccaagattgtgaacttactttaagtgtgtcagagatcaccttccagctctgatgtattggcatttacatcccaatctgctgaaactgccttctcctcatggtccttttcttctctaaggtcagaagcacctttccagttctaatgtgctccctgcttctcttttattctccagatgcagttaatgccccactcacctgctgctactcattcactggcaagatgatcccaatgagtcggctggagaactacaagagaatcaccagcagcaggtgtcccaaagaagctgtagtgtgagttatacaccccagccctccctggtccaatatttttcctcgagaacaagggatggtcttcatagacttagaatcagttacatgctcagctccaatatcaagtggttcccaatggggaaactgaggccaagaagggaaagttaattctcagcagcactgtctctatggctgctgttcggggccttccatttgcatgagcttattgtagtaaacttgcagaagaggaaggtcactttgagtccccctttctacctgccctcccacctcgagccctacacagtccctccatgtatagcaggttaaacttcatctaaccgtgtcttctctctttccacagatttgtcaccaagctcaagagagagatctgtgctgaccccaataaggaatgggtccagaagtacattagaaaactggaccagaaccaagtgagatcagaaactacagtcttctataaaattgcatcaaccctaaggacttcagcacctttgaatgtgaacttgacccataaatctgaagctaatgcatccactctcttttccacaaccacctcaagcacttctgtagaagtgaccagtatgacagagaactagtgtgatttggaatgtgatgccttaagtaatgttaaacttatttaacttattgatattacactattcccttccatgaatactagaaatccttaaatgcaagatgtagatccatttttttatttctctgtgaatcctggttcaacactttcaatgtatgagagatgaatgggtaaactttgtgtttgagagtccaaggtattgtttaaaatattattatggatattcctaattattaaaagaaatatattatttttgtacacaagtctgactttcggtgttttctgagggaaatggcaaagctaagagtacataagaacacacaggaggacatcacaagatgggacacatattgagggggggatgggggaatgaatgctgcactcttttgtattgagtggtctcatgtgagtgtcataaactctttgagacagggtccagtcagggatgctagtaccatagttccaatccccaggactgcttctcagacacatgctcgataaaagccccagtccttcccagtcatg

SEQ ID NO: 1532 - DNA, 817 bp, Rattus norvegicus
agcggcgccgggcagaagatggcggtgcagatttccaagaagaggaagtttgtagctgatggcatcttcaaagctgaactgaatgagtttctcactcgggagctggctgaagatggctactctggagttgaagtccgagttacgccgaccagaacagaaatcattattttagccaccagaacacagaatgttcttggggagaagggtcgtcggatcagagagctgactgcagttgtccagaagcggtttggcttccctgaaggcagcgtagagctgtatgcagaaaaagtggccacaagaggtctgtgtgccattgcccaggcagagtctctacgctacaaactcttaggagggcttgcagttcgaagggcctgctatggtgtgcttcggttcattatggaaagtggggccaagggctgtgaggttgtggtctctgggaagctccgaggacagagggccaagtccatgaagtttgtggatggtctgatgattcacagcggagaccctgttaactactatgttgacactgctgtgcgccatgtgctcctcagacagggcgtgctgggcatcaaagtgaagatcatgctgccctgggacccaagtggtaagattggtcccaagaagcctctgcctgatcatgtgagcattgtggaacctaaagatgaaatcttgcccaccacccccatctcagaacagaagggtgggaagccagagccacccgccatgcctcagccagtgcctacagcataacagggtcttggcagctgcatctggaggctggatgttgtcttgtaaagacgtttaataaaatcttgaa

SEQ ID NO: 1533 - DNA, 2376 bp, Rattus norvegicus
cgcggccgtccgctctcccaactcgcagccagtcggcgcgtcccgcctactgagcgcagcctccaccaggatccgcggggaccagctcgggatcagccggcgacccacttctgaccaacccaggagcggcccgatacccactcccgaccaacccgcgaccgacccagggacccactccggacctgctccttacaggggacagcgcctcgccgcttcccgccgcccagcgcccgcacgctcctcgggacacagtgccaaccatccagaggacaagatggattggggcacactacagagcatcctcgggggtgtcaacaagcactccaccagcattgggaaaatctggctcactgtcctcttcatcttccgcatcatgatcctcgtggtggccgcgaaggaggtgtggggagatgagcaagccgattttgtttgcaacactctccagcctggctgtaagaatgtgtgctacgaccactacttccccatctctcacatccggctctgggctctgcagctgatcatggtgtccacgccggccctcctggtagctatgcacgtggcctaccggagacacgaaaagaaacggaagttcatgaagggagagataaagaacgagtttaaggacatcgaagagatcaaaacccagaaggtccgtatcgaagggtccctgtggtggacctacaccaccagcatcttcttccgggtcatcttcgaagctgtcttcatgtatgtcttttacatcatgtacaatggcttcttcatgcagcgtctggtgaagtgtaacgcctggccttgtcccaatacagtggactgcttcatttccaggcccacagaaaagactgtcttcacggtgttcatgatctctgtgtctggaatttgcatcctgctaaacatcacagagctgtgctatctgttcattaggtattgctcagggaagtccaaaagaccagtctaatgcattgcctggctgttaagcaaagatgagggagaggatgaggcaacctgtgcttagttatcagagttcagctaccagcatctcccgggcaaacattcccaccttaaatgccgccatttgaagtcccccgcaggcctcccatgaaactccagaagcctccatgggcctcccttcccccaaagctcccaaacaaaggcccaattctatgcctgtattaatgggttctaaagttagttagaccccgtgctggtgtgactatgctttaggatacattcacagtttaaacaaagggatctcacattgtttctcttcctctgaggacaggagacatgagcccagtcctgaggaaggtacagagaaagttccttcttccgggtccccttccccaagttgcccccagttaagggtaaagaatcttcgttctgttattttctttcatagtttaagtttgcaacaatggacaaaagctatttaatgttcaagctagctgtgtccttttttttttttttaaatgaaaaccttaaaatgataggttcttttgttcttaaaatgatctggaaagcattatacattcctcctatttcagaggttcggtttgtgatgtgagcatggtgtataaccagatctcacaaggtctttaaaacgttggccttttggttatgggaaacctgggctgtggctgagagcccacctactgtattcatccttaggtgtgctgagtacagcccgcaacaacgttacagcctgtctcaaatgagacaaactggaagcttctcgtgttagcttctgacaagaagaggccttgattaaaattttcaaccgtaattttgtgtaagaggcagataggttatgcctacaactgccccctgccatgagcctaactcagcccccctccacccccagctcgtctactctgtagctgtgggatgtggcagtcagtatcaaaagacttcatgagtttgcttgggaatttcactgccatggtacaatttaatggtgcagaaacaagatggggtggttttcaaagaaccgatgaaacttctagactctaaatcctgttgattaaaactgagtttttctactttgaatgtctgtttgcctcccttttcagcattgccttctaaactggaaacagaaatgttgatatttggaaaaaatagaagaaactagtttaggtcaatgtgtaacttttctaggacaagttgaaccttagcattgtcattctgcctgatgtgttgtccacaagatgacagtcaacaaatccaacaggggacacttcttcctgccaagaatgtcgttgggaagccattctgtaacaataaataagagttgtggtttaaagtctacactattttacctaatgaagaacttattgctgatgttcagaaattcgacattgaaaggtgttttgccaatacggg

SEQ ID NO: 1534 - DNA, 509 bp, Rattus norvegicus
cctttcccctggctggcagcgcggaggccgcacgatgcctggagttactgtaaaagacgttaaccagcaggagttcgtcagagctctggcagccttcctcaaaaagtctgggaagctgaaagtccccgaatgggtggacacagtcaagttggccaaacataaagagcttgccccatatgatgagaactggttctacacacgagctgcttccacagcacggcacctgtacctccgtggtggtgcaggggttggttccatgaccaagatctacggaggacggcagagaaacggtgtcaggcccagccacttcagcagaggctctaagagtgtggcccgccgggtcctccaagccctggaggggctgaaaatggtggaaaaggaccaagatgggggccgcaagctaacacctcagggacagagagatctggacaggatcgccggacaggtggcagctgccaacaagaagcattagaacaaaggatgctgggttaataaattgcctcattcat

SEQ ID NO: 1535 - DNA, 670 bp, Rattus norvegicus
ctctttctaagccggcactccgtaaggacgaagccatgttcagctcgagcgccaagattgtgaagcccaatggcgagaagccggacgagttcgagtctggcatctctcaggcgctgctcgagctggagatgaactcggatctgaaggcgcagctgcgggaactcaacatcaccgcggcaaaggaaatcgaagtcggtggtggtcgaaaagccatcataatttttgtaccagttcctcagctgaaatctttccagaaaatccaagtccggctagttcgtgaattggagaaaaagttcagtgggaaacacgtagtcttcattgctcagaggaggattctgcccaagccaacccgaaaaagccgtacgaaaaataagcaaaagcgccccagaagccgcaccctgacagcagtgcacgacgccatccttgaggatttggtcttcccaagtgaaattgtgggcaagaggatccgtgtgaaactggatggcagccggctcataaaagttcatttagacaaagcacagcagaacaacgtggagcataaggtcgaaactttttctggcgtgtacaagaagctcacaggcaaggatgttaactttgaattcccagagtttcagttgtaaagaaaatgactgaataaaatgtcattcataataaaaaaaaaaaaaaaaaa

SEQ ID NO: 1536 - DNA, 535 bp, Rattus norvegicus
ctctttgcttccagacctccgccatcatgggtcgcatgcacgctcccgggaagggcctgtcccagtcggcgctgccctaccgccgtagcgtgcccacgtggctgaagttgacgtctgacgacgtgaaggaacaaatttacaagttggccaagaaaggcctgactccttcccagataggtgtgattctgagggactcacatggtgtggcacaggtccgttttgtgaccggaaataaaatcttgagaatccttaagtccaaaggccttgcccctgatcttcctgaggatctctaccatttgatcaagaaagcagttgctgtcagaaagcaccttgagaggaacagaaaagataaggatgctaaattccgcctgattctaattgagagcagaattcaccggctggctcgatactataagactaagcgggtgctcccacccaactggaaatatgagtcatccacagcctctgctctggtggcataaatgctgttgcgtacacaagcaataaaatcactttgagtaaaaaaaaaaaaaaa

SEQ ID NO: 1537 - DNA, 664 bp, Rattus norvegicus
ctttcggttcggaggaggcaacggtgcaactttcttcggtcgtcccgaatccgggttcatccgacaccagccacctccaccatgccgcccaagttcgaccccaacgagatcaaagtcgtgtacttgaggtgcaccggaggcgaggtcggcgccacatccgccttggcccctaagatcggtcctctgggtctgtctcccaaaaaagttggtgatgacatcgccaaggctaccggtgactggaaaggcctcaggattacagtgaaactgaccatccagaacagacaggcccagattgaggtggtgccctctgcctctgccctgatcatcaaagccctcaaggagccaccaagagacaggaagaagcagaaaaacattaaacacaatggaaacatcacttttgatgagattgtcaacattgcccggcagatgagacaccggtctttggccagagaactttctggaactatcaaggagatcctgggtactgcacagtctgtgggctgcaatgtggacggccgccaccctcatgacatcatagatgacatcaacagtggtgcggtggagtgcccagctagttaagaagcaacgagaaggggttgggaatttagctcagtggtagagcgcttgccaagcccaaggccctgggttcagtccccagctccgg

SEQ ID NO: 1538 - DNA, 1158 bp, Rattus norvegicus
ggccaacacctcttctgtctgggttcctcaagctgctcgctccccatctaggcgaagatgtccgcccaagagagttgcctcagcctcatcaagtacttcctcttcgttttcaacctcttcttctttgtactaggaggcctgattttctgctttggcacctggatcctcattgacaagaccagcttcgtgtcctttgtgggcttgtccttcgtgccactgcagacctggtccaaggtcctgtcggtctcgggtgtcctcaccatggccctggctctcctgggctgtgtgggggctctaaaggagctgcgctgtcttctgggcctgtatttcggaatgctgctgctcctgtttgccacacagattaccttggggatcctcatttccactcagcgagtccggctggagcgaagggtgcaggaattggtgttacggaccatccagagctaccgcacgaatccggatgagacagctgctgaggagagctgggactatgcgcagtttcagctgcgctgctgcggttggcaatctccgcgggactggaacaaggcccagatgctgaaagcaaacgggtccgaagagctctttgtgccctgctcctgctacaattccaccgcgaccaatgactcctccggctttgataagctctttctctcccagctaagccggctggggccgcgggcgaagctgaggcagactgctgacatatgtgcactccccgcaaaagcccatatataccgtgagggctgcgcgcggagcctccagaagtggctgcacaacaatatcatctccatagtgggaatttgtctgggagtcggtcttcttgagctcggcttcatgacactctcgatattcctgtgtagaaatctggatcacgtctatgaccggctggcccggtaccgctaggccccaacccaccggttggcacccacgcacctccatgcagtcaggaactgtttccttcctggttggttacaggcttggagccctgtgcctcaggcctcattctctggggacccagatgtctgccctaagacagccttcacttcccccacagggccagggactttcgagcccagcttccttccctgctccctcctccccacaccatctgtctgccacctcccacatgacacctcaaataaatccccttcttttttg

SEQ ID NO: 1539 - DNA, 6335 bp, Rattus norvegicus
ggatcccggcccgcagcagctctctgctcccagaacccgtgagaaagagacctcaccgcctggtcaggtgggcactcctgaggctgcagagcggaagagaccaccaacactgcccacccctgcccacatccctggcccaagaggaaactgtataaggcctctgggttccgtgggggagggcccaggagcgtcaggacccctgcctgagacaccgccggaacctgagggaaacagaccggataaacagttctctgcacccaaatcccatgggagggagagctgaaccttcagagaggcagacaagccttggaaaccagaagagactgctctctgtacatacatctcggacgccagaggaaaacaccaaaggccatctggaaccctggtgcactgaagctcctggaaggggcggcacaggtcttcctggttgctgccgccacagagagcccttgggcagcaccccgcctggtgaactcaagacacaggcccacaggaacagctgaagacctgcagagaggaaaaactacacgcccgaaagcagaacactctgtccccataacggactgaaagagaggaaaacaggtctacagcactcctgacacacaggcttataggacagtctaaccactgtcagaaatagcagaacaaagtaacactagagataatctgatggtgagaggcaagcgcaggaacccaagcaacagaaaccaagactacatggcatcatcggagcccaattctcccaccaaaacaaacatggaatatccaaacacaccagaaaagcaagatctagtttcaaaatcatatttgatcatgatgctggaggacttcaagaaagacgtgaagaactcccttagagaacaagtagaagcctacagagaggaatcgcaaaaatccctgaaagaattccaggaaaacacaatcaaacagttgaaggaattaaaaatggaaatagaagcaatcaagaaagaacacatggaaacaaccctggatatagaaaaccaaaggaagagacaaggagccgtagatacaagcatcaccaacagaatacaagagatggaagagagaatctcaagagcagaagattccatagaaatcattgactcaactgtcaaagataatgtaaagcggaaaaagctactggtccaaaacatacaggaaatccaggactcaatgagaagatcaaacctaaggataataggtatagaagagagtgaagactcccagctcaaaggaccagtaaatgtcttcaacaaaatcatagaagaaaacttccctaacctaaaaaaagagatacccataggcatacaagaagcctacagaactccaaatagattggaccagaaaagaaacacctcccgtcacataatagtcaaaacaccaaacgcacaaaataaagaaagaatattaaaagcagtaagggaaaaaggtcaagtaacatataaaggcagacctatcagaatcacaccagacttctcgccagaaactatgaaggccagaagatcctggacagatgtcatacagaccctaagagaacacaaatgccagcccaggttactgtatcctgcaaaactctcaattaacatagatggagaaaccaagatattccatgacaaaaccaaatttacacaatatctttctacaaatccagcactacaaaggataataaatggtaaagcccaacataaggaggcaagctataccctagaagaagcaagaaactaatcgtcttggcaacaaaacaaagcgaatgaaagcacacaaacataacctcacatccaaatatgaatataacgggaagcaataatcactattccttaatatctctcaacataaatggccttaactccccaataaaaagacatagattaacaaactggatacgcaacgaggaccctgcattctgctgcctacaggaaacacacctcagagacaaagacagacattacctcagagtgaaaggctggaaaacaattttccaagcaaatggtcagaagaagcaagctggagtagccattctaatatcaaataaaatcaatttttaactaaaagtcatcaaaaaagataaggaaggacacttcatattcatcaaaggaaaaatccaccaagatgaactctcaatcctaaatatctatgccccaaatacaagggcacctacatatgtaaaagaaaccttactaaagctcaaaacacacattgcacctcacacaataatagtgggagatttcaacaccccactctcatcaatggacagatcatggaaacagaaattaaacagagatgtagacagactaagagaagtcatgagccaaagggacttaacggatatttatagaacattctatcctaaagcaaaaggatataccttcttctcagctcctcatggtactttctccaaaattgaccatataattggtcaaaaaacgggcctcaacaggtacagaaagatagaaataatcccatgcatgctatcggaccaccacggcctaaaactggtcttcaataacaatcaaggaagaatgcccatatatacttggaaactgaacaatgctctactcaatgataacctggtcaaggaagaaataaagaaagaaattaaaaactttttagaatttaatgaaaatgaaggtacaacatacccaaacttatgggacacaatgaaagctgtgctaagaggaaaactcatagcgctgagtgcctgcagaaagaaacaggaaagagcatatgtcagcagcttgacagcacacctaaaagctctagaacaaaaagaagcaaatacacccaggaggagtagaaggcaggaaataatcaaactcagagctgaaatcaaccaagtagaaacaaaaggaccatagaaagaatcaacagaaccaaaagttggttctttgagaaaatcaacaagatagataaacccttagccagactaatgagaggacacagagagtgtgtccaaattaacaaaatcagaaatgaaaagggagacataacaacagattcagaggaaattcaaaaaatcatcagatcttactataaaaacctatattcaacaaaacttgaaaatcttcaggaaatggacaattttctagacagataccaggtaccgaagttaaatcaggaacagataaaccagttaaacaaccccataactcctaaggaaatagaagcagtcattaaaggtctcccaaccaaaaagagcccaggtccagacgggtttagtgcagaattctatcaaaccttcatagaagacctcataccaatattatccaaactattccacaaaattgaaacagatggatcactaccgaataccttctacgaagccacaattactcttatacctaaaccacacaaagacacaacaaagaaagagaacttcagaccaatttcccttatgaatatcgacgcaaaaatactcaacaaaattctggcaaaccgaatccaagagcacatcaaaacaatcatccaccatgaccaagtaggcttcatcccaggcatgcagggatggtttaatatacggaaaaccatcaacgtgatccattatataaacaaactgaaagaacaaaaccacatgatcatttcattagacgctgagaaagcatttgacaaaattcaacaccccttcatgataaaagtcctggaaagaattggaattcaaggcccatacctgaacatagtaaaagccatatacagcaaaccagttgctaacattaaactaaatggagagaaacttgaagcaatcccactaaaatcagggactagacaaggctgcccactctctccctacttattcaatatagttcttgaagttctggccagagcaatcagacaacaaaaggaggtcaaggggatacagatcggaaaagaagaagtcaaaatatcactatttgcagatgatatgatagtatatttaagtgatcccaaacattccaccagagaactactaaagctgatagacaacttcagcaaagtggctaggtataaaattaactcaaataaatcagttgccttcctctatacaaaagagaaacaagccgagaaagaaattagggaaacgacacccttcataatagacccaaataatataaagtacctcggtgtgactttaacaaagcaagtaaaagatctgtacaataagaacttcaagacactgaagaaggaaattgaagaagacctcagaagatggaaagatctcccgtgctcatggattggcaggattaatatagtaaaaatggccattttaccaaaagcaatctacagattcaatgcaatccccatcaaaataccaatccaattcttcaaagagttagacagaacaatttgcaaattcatctggaataacaaaaaacccaggatagctaaagctatcctcaacaataaaaggacttcagggggaatcactatccctgaactcaagcagtattacagagcaatagtgataaaaactgcatggtattggtacagagacagacagatagaccaatggaatagaattgaagacccagaaatgaacccacacacctatggtcacttgatttttgacaaaggagccaaaaccatcaaatggaaaaaagatagcattttcagcaaatggtgctagttcaactggaggtcaacatgtagaagaatgaagatcgatccatgcttgtcaccctgtacaagcttaagtccaagtggatcaaggacctccacatcaaaccagacacactcaaactaatagaagaaaaactagggaagcatctggaacacatgggcactggaaaaaatttcctaaacaaaacaccatggcttacgctctaagatcaagaatcgacaaatgggatctcataaaactgcaaagcttctgtaaggcaaaggacactgtggttaggacaaaacggcaaccaacagattgggaaaatatctttaccaatcctacaacagatagaggccttatatccaaaatatacaaagaactcaagaagttagaccgcagggaaacaaataaccctattaaaaaatggggttcagagctaaacaaagaattcacagctgaggaatgccaaatggctgagaaacacctaaagaaatgttcaacatctttagtcataagggaaatgcaaatcaaaacaaccgtgagatttcacctcacaccagtgagaatggctatgatcaaaaactcaggggacaacagatgctggcgaggatgtggagaaagaggaacactcctccattgttggtgggattgcaaactggtacaaccattctggaaatcagtctggaggttcctcagaaaattggacattgaactgcctgaggatccagctatacctctcttgggcatatacccaaaagatgccccaacatataaaaaagacacgtgctccactatgttcattgcagccttatttataatagccagaagctggaaagaacccagatgcccttcaacagaggaatggatacagaaaatgtggtacatctacacaatggaatattactcagctatcaaaaacaacgagtttatgaaattcgtaggcaaatggttggaactggaaaatatcatcctgagtaagctaacccaatcacagaaagacatacatggtatgcactcattgataagtggctattagcccaaatgcttgaattaccctagatacctagaacaaatgaaactcaagacggatgatcaaaatgtgaatgcttcactccttctttaaaaggggaacaagaatacccttggcagggaagagagaggcaaagattaaaacagagaatgaaggaacacccattcagagcctgccccacatgtggcccatacatatacagccacccaattagacaagatggatgaagcaaagaagtgcagaccgacaggagccggatgtagatcgctcctgagagacacagccagaatacagcaaatacagaggcgaatgccagcagcaaaccactgaactgagaataggacccccgttgaaggaatcagagaaagaactggaagatcttgaaggggctcgagaccccatatgtacaacaatgctaagcaaccagagcttccagggactaagccactacctaaagactatacatggactgaccctggactctgacctcataggtagcaatgaatatcctagtaagagcaccagtggaaggagaagccctgggtcctgctaagactgaacccccagtgaactagactggtggggggagggcggcaatggggggagggttgggaggggaacaccataaggaaggggaggggggagggggatgtttgcccggataccgaaagggaataacatcgaaatgtatataagaatactcaagttaataaaaaaaaaaaaaaaaaaaga

SEQ ID NO: 1540 - DNA, 1934 bp, Rattus norvegicus
cctataagccggcgacctctggcattaagctttgctctcttcgggccgtcgcgaccatgcagacccccggcgtcttgctgctcattctcggcctcctggatgcgtcctcctccgcgcttatcagaatccccctgcgcaagttcacatccatccgtcggactatgacggaagtgggaggctctgtggaagacctgatccttaaaggtcccataaccaagtactccatgcagtcatctcctaggaccaaggagccagtgtcagagttactaaaaaactacctggatgcccagtactatggtgagatcggcattgggactcccccacagtgtttcacagtcgtctttgacactggctcctctaacctgtgggtcccctccattcattgcaagctgctggacatagcctgctgggtccaccacaagtacaacagtgacaagtccagcacctatgtgaagaatggcacatccttcgacatccactacggctcaggtagcctctctgggtacctgagccaggacactgtgtcggttccatgtaagtcagacttaggaggtatcaaggtggagaaacagatctttggggaagccaccaagcagcctggagtcgtattcatcgcagccaagtttgatggcatcttgggcatgggctacccttttatctctgttaacaaggtgctcccggtcttcgacaacctgatgaaacagaagctggtggaaaagaacatcttctccttctacctgaacagggacccaaccgggcaacctggaggagaactaatgcttggcggcactgactccagatactaccacggggagctgtcctacctgaacgtcacccgaaaggcctactggcaggtgcacatggaccagctggaggtgggcagcgagctgaccctgtgcaagggaggctgtgaggctattgtggacacagggacgtctcttctggtggggcctgtggacgaggtgaaggaactacagaaggccattggggcagtgcctctcatccagggcgagtatatgatcccttgtgagaaggtgtccagcctgcccattatcacctttaagctaggaggccaaaactatgaactacacccagagaagtacatactcaaggtatcgcaggctggaaagacgatctgcctgagtggcttcatggggatggacataccccctcccagtgggccgctctggatcctgggcgatgtctttattggctgctactacaccgtgtttgacagagaatacaatagggtcggctttgccaaggctgccacactctaacttgctccttcttcactgtcagggaactggatcagagtccagtagagaaagccagccagccccatccctccacctgccccactcacacatattcacactcgcctagtgttgctgggcccttgggaggcctggctggagctggtccagctgttctgttctgtggtccctgtccctgggttcagattgctgccctccgcctgtctgaaggaggccaaggcctacccagtacaaaaggctgcctttaaaggcccctactggcttggtagctgccgggatgaattgtcttgtcctgctgccctttgctgcgtgggcagcactctgaagcaggcaaatgggtcttgggatccctcccagaaacctgctctgaccagaccctcaggcagcctggggatggcaccaagctctactgccccactatctctggcctggcaaaggctgaaggtgagcagaaggagcaagaggacagaagcaaaactatatgaacctggggggggttacctgggacctgaccccaccctcctgggaaggcatgcttcagcctggggcagaggtaggatggctgactggttttggctggcctctgctgccctcatcctgggctagtcagatgggagccaaagttgatatacaaataaagttgttttgggcctcttt

SEQ ID NO: 1541 - DNA, 573 bp, Rattus norvegicus
gcttcctgtccggtgagcgtcgaacgactgaagcggtggcccatagtgcattgcgatggcgggtaggcgtgtgtaggcggagccagggccggaagtagaacggtggcggcggcggtgactctggcagctcgggactcagtgcaagtaccacagactcaaccatgactgttcagaggatcttcaggctctcctctgtccttcggtcagcagtctctgtgcatttgaggaggaacattggtgttacagctgtggcgtttaataaggaacttgatcctgtacagaaactcttcttggacaagataagagagtacaaagcaaagcgactggcgtctggaggacctgttgatactggcccagaatatcagcaagaggtggacagagagctttttaagcttaaacaaatgtatggtaaaggagagatggataagtttcctaccttcaattttgaggatcccaaatttgaagtcctcgacaaaccccagtcctgaggaacatacaaaccatgtggtaatttgtcatgacttagttgtacaattaatctaaaaaattcaaataaacattcacttcacagct

SEQ ID NO: 1542 - DNA, 811 bp, Rattus norvegicus
tccatcttccctccaggcaccatccaggaggattacctgagggagctgctcaccaccatgggcgaccgcttcacagatgaggaagtggatgagctgtacagggaggcccccatcgacaaaaaggggaatttcaactacatcgagttcacgcgcatcctcaagcacggagcgaaagacaaagatgactgaagagctgtggcttccagccaaatgtccctgttgccattgggtcctcctggagcggtcggctgcccttgcttttctgccttttgcttcccttgttttgtatttattctcagccactttgggccacgtgtaccttcatcatcagactggaaacgggactttctgtcattgttcgatgagaacgtaaggtaatttaacttacagacagtcttgtcccttgtaataactgcagccacagagtcagtatattttttcagagaaagttatccactcaattttttctgaatgataattaaactttctgataaaatacttagttgtttagccttctttccctacttgacttttagttttaccgagtctttccccaagcagggtagatgaggtgaatgacagcctgtcagagtttgctcccactcttcagttgtgtttccagttgtgtttccatcggcaatcccagtttcctctactcctagtttattctctctctccctcctggaaatcaagataaagctccttgggtacccaagactttgtcttccagtttggaaaataaggcctgaattctcgatccctggggtagctcagactccccttaaacgtctctctgcattacttcctgcag

SEQ ID NO: 1543 - DNA, 3165 bp, Rattus norvegicus
  misc_feature (1)..(3165): n = a or c or g or t
gcagaatttggcaggcccaggctagggtgcaccaacccttaggctcagaatgacgagacagggccgggctctttccctccggctattgccacacttcctgcctcggctctttttccctagcctgtttctaaggaagggagtggggttgggcgaccgcaccccagctatcccgcctcttcggccctccaaaagctgacaggatatcgggcgagcccagagtgactaaggggaggctttggactcaggtacagggtatgtcagtgcctagagaccacttacgaggtacagtctcattcttacaagccccttgtctctgggatcctccaagtcgtcctctcgggtagatctcagataccctcctggcatcgcctttacagctcagaaggaagccatgtcctgaccattttaactttccatcagagttctgcaaataatcacagtgaccccaatctttgctagatatgttcccatcttctactcctattgcctcagcgtttccaggacccttgttcactttctgcatatctaaattgacctccccaaaattactccccttttccacttatgggagaaccctcagactcatctgtgggctttagagcccctactcatttctatacaataggtacctgaccctgcttcctgaaccttctctcccacctgttcttaagcacttgcactcggggcctctagttaattcctaggtcaaatgttaacaattgctcccgttttgtaccttccctgttttctggggtcttctagtatattgtcagttcacaagtcacagctattgtgggtcgccgcgagactattccgggaatatcctgaggcaccccatctaccttgcagtgtacagagatctcatagccaccgggttgtactcccgcagtcctaactcctatgtgcctcggtccctcaacatccctttgcttgagtgtctctgtctctacagcccctccccctgcagccgcgcagagccaccgggctgctggccgctgtttacaaggacacgcgcttcctgacagtgacgcgagccgcctcctccccttccccacgctctaggagggggccgcgggggcctggctcccgcgtcggccaatcggagtgcacttccgcagctgacaaattcagtataaaatgcttggggctggggccgaacactggggaccttgagggtggccaggccagctttggatcctgcagggagcggggagctgagagaagagacgctgagaaagcgggcgcaccacggagggagagaaaagctccagaagccgggcagcgcttttacgcacagctaccaactggccgctgccgaccgtctccagctcccgaggacgcgcgaccggacgccgggtcccgccacagccgaggacagctcgccggtcgccgcaggcaggcccggagcggccttcagggggacctttcccagatcgcccaggccgcccggatgtgcacgaaaatggaacaggctttctatcacgacgactcttacgcagcggcaggatacggtcggagccctggcagtctttctcttcacgactacaaactcctgaaacccaccttagcgctcaacctggcagatccttatcggggtctcaagggtcctggggcgcggggtccaggcccagagggcagtggggcaggcagctacttttcgggtcagggatcagacacaggcgcatctctgaagctagcctccacggaactggagcgcttgatcgtccccaacagcaacggcgtgatcacgacgacgcccacgcctccgggacagtacttttacccccgtgggggcggcagcggcggaggtacagggggcggcgtcaccgaggagcaggagggctttgcggacggttttgtcaaagccctggacgacctgcagaagatgaaccacgtgacgccccccaacgtgtctctgggcgccagcgggggtccccaggccgggccagggggcgtctatgctggtccggagccgcctccggtctacaccaacctcagcagttactccccagcctctgcaccctctggaggttccgggaccgccgtcgggactgggagctcatacccgacggccaccatcagctacctcccacatgcaccaccctttgcgggcggccacccggcacagctgggcttgagccgtggcgcttccgcctttaaagaggaaccgcagaccgtaccggaggcacgcagccgcgacgccacgccgcctgtgtcccccatcaacatggaagaccaggagcgcatcaaagtggagcgaaagcggctgcggaacaggctggcggccaccaaatgccggaagcggaagctggagcgcatcgcgcgcctggaggacaaggtgaagacactcaaggctgagaacgcggggctgtcaagtgctgccggcctcctacgggagcaagtggcgcagctcaagcagaaggtcatgacccacgtcagcaacggctgccagttgctgctaggggtcaagggacacgccttctgagagcctcccttgctccatacggacacccccagccttgaaggctgggcgcccgccccccactggggtgaggggggcaggcgatgggcactcgcccagaggtctggggcgcagctcacacactggactctggcctgcccgcctgcgcccagtccttccacctcgaggtttacatggcccccttccagcgtattttgtatgttttttttttctggaaagagactgaattcatattgaatataatatatttgtgtatttaacagggaggggagaagggggttgtcgcggcggagtggccccgccgcctggtactcagcctgtggggatactagggaggaacctccgccccctgccctccccctctgcacagtactgtggagaagaaacacgcacttcgtgtctaaagtctattttaagatgtgtttgtgtgtgtgtttgactttttattgaatctatttaagtaaaaaaaaagtctttattaatttctgtggtctctttcttccaagctgnncgnatggagggagaagattgggctgnnccaagcccggggcagtttgtagttctctcctttcgggtatcttaaggtccagtacaagcgctcaaacctcccatcccctgaggtcctggcaccagagctgcgcaggcaggcagtggccgagttacaagctatccaggccgaattc

SEQ ID NO: 1544 - DNA, 2234 bp, Rattus norvegicus
ctcggaggaatggcgccgccgggttcaagtgctgtcttcctgttggccctgacaatcacagccagcacccaggctctgacccccacccactacctcaccaagcatgatgtggaaagactgaaagcctcactggatcgccctttcacgagcttggagtctgccttctactccattgtgggactcaacagccttggggcacaggtgccagatgtcaagaaagcgtgtgccttcatcaagtcaaaccttgatcccagcaacgtggattctctcttctatgctgcccaatccagccaagtcctctcaggttgtgagatatctgtttcgaatgagaccagagatctgcttctggcagcagtcagcgaggactcctccgttgcccaaatctaccatgcagttgccgccctcagtggctttggtcttcccttggcatcccatgaagcccttggtgcccttaccgctcgcctcagcaaggaggagactgtgctggcaaccgtccaggctctgcacacagcatcccacctatcccagcaggctgacctgaggaacattgtagaagagatcgaggaccttgttgctcgcctggacgaactagggggtgtgtatctccagtttgaggaaggcctggaacttacagcattgtttgttgctgccacctacaagctcatggaccatgtggggactgaaccgtccatcaaggaggatcaggtcatccagctcatgaacacaatcttcagcaagaagaactttgagtccctctcagaagccttcagtgtggcctctgctgctgctgcattgtcccagaatcgctatcacgtaccagtggtggttgttcctgagggctctgcttctgacactcaagaacaggctatcctgcggttgcaagtcagcagtgttttgtctcacgctctggctcaagccgcagttaagctggaacatgctaagtccgtggcttccagagctactgtcctgcagaagatgcccttttcacttgtaggggatgtttttgagctaaacttcaagaatgttaaacttcccagtggctactatgacttctctgtcagagttgaaggtgacaaccgttacattgcaaacactgtagagcttagagtcaagatctccactgaagttggcatcaccaatgctgatctttccactgtggacaaggatcagagcatcccacccaaaactacccgggtgacctacccagccaaagccaagggcacattcatcgcagacagccatcagaacttcgccctgtttttccagctggtagatgtgaacaccggtgcggagctcacccctcaccagacatttgttcgacttcataaccagaagactggccaggaagtggtgtttgttgctgagccggataacaagaatgtgcataagtttgaactggacacctctgaaaggaagattgagttcgactctgcctctggcacttacacactctacctaatcatcggggacgccactttgaagaaccccatcctctggaacgtggctgatgtggttatcaagttccctgaagaagaagctccctccactgtgctgtcccagaacctttttaccccaaaacaggaaattcagcacctgttccgagagcctgagaagaggccccccactgtggtgtccaatacattcacggccctcatcctctcgcccttgctcctgctctttgcactgtggatccggattggagccaatgtctccaacttcacctttgctcctaccacgattatctttcacctgggacatgctgcaatgctggggctcatgtatgtctactggactcagctcaacatgttccagaccctgaagtacctggccgtcctgggcactgtgacatttctggctggcaaccgaatgctggcccagcaggcagttaagagaacagcacattagttccagaagaagtttgaagaccctgaactcggaaatgaccgtttaacaaagagtggagacagttcagagtgtggaaagaatcgggggacagaataggagaagaggaaatacctgttatttaaagagagaaaagtcgagctatgcttacacgtttacttgtttctcactttttgcttcactgaacagatatgtttggacccagattgtctgtccctttgttgtgatgcctggccagattctgtgaatatcccaggttacccagaggttgtatttgaaaagttgaaatctgtaattcatcagctttggaataaagagaatggtggactccc

SEQ ID NO: 1545 - DNA, 1065 bp, Rattus norvegicus
ctgatctgcaccctcactgtcttcctccggatccacataaaattcagaagccatgtctcgaagatatgactccaggaccacaatattttctccagaaggtcgcttataccaagtggaatatgccatggaagccattggacacgcaggcacttgtttgggaattttagccaatgatggcgttctgcttgcagcagagaggcgcaacatccacaagcttcttgatgaagtctttttttctgagaaaatttataaacttaacgaggacatggcttgcagtgtggcaggcataacatctgatgccaacgttctgactaatgaactcaggctcattgctcaaaggtacttattacagtatcaggagccaattccctgtgagcagttggttacagcactgtgtgatatcaaacaggcgtacacacagtttggaggcaaacgtccctttggtgtttctttgctgtatattggctgggataagcactatggctttcagctctatcagagtgacccaagtggaaactacgggggatggaaagccacatgcattggaaacaacagtgctgcagcggtatcaatgctgaaacaagactacaaagaaggagaaatgactctgaagtcagcgctggctctggctgtcaaggtgctaaacaagacaatggatgttagtaaactgtcagctgaaaaagtggaaatcgccacactaacaagagagaatggaaagaccgtgatcagagtcctcaagcaaaaggaagtggaacagttgatcaaaaaacatgaagaggaagaagcgaaagctgaacgggagaagaaagaaaaagaacagagagaaaaggataaatagacagaatcatggattttataactccttagaggcgccagttcacttaggagctgtcctggccttcccctggaagtgttttcttgtattttcttccttaccttggccatcggggaaatgggacattgcatactgaattgggtccatgtctgtccagctggatgctttattgtaatgatggacatctttataaacatcttaatctcgacacataatttttggaataaaac

SEQ ID NO: 1546 - DNA, 999 bp, Rattus norvegicus
catcaggtgctctaccgagcgctggtctccaccaagtggctggcggaatccattcggtccggcaaggtggggccaagccttcgggtgctggacgcgtcatggtactcaccagggacccgccaggcacgcaaagagtaccaggagcgacacgtgcctggcgcgtccttctttgatatagaggagtgccgggacacgacttcgccttacgagatgatgctgcccagtgaggcccactttggggactacgtgggcaacctgggcataagcaacgacacacacgtcgtggtatacgatggagacgacctgggcagcttctatgcacccagagtatggtggatgtttcgtgtgtttggccaccgcacagtatcagtgctcaatggtggcttccggaactggctgaaggagggccacccggtgacatctgaaccctcgcggccagagccagccgttttcaaagccacactgaaccgctccctgctcaagacctatgagcaggtcctggagaacctccagtctaaaaggttccagctggtggattctcgggcccagggacggtacctgggcacacaaccggagcccgatgcagtaggactggactcaggccacatccgtggctctgtcaacgtgcccttcatgaacttcctgacagaagatggcttcgagaagagcccagaggagctgcgtgccatattccaggacaagaaggtggacctctcccagccccttatcgccacatgccgcaaaggggtcactgcttgccacattgccctggctgcctacctttgtggcaagcccgatgtggctgtttacgatggctcctggtcagagtggtttcgcagggcccccccggagacccgtgtgtcccaggggaagagtgggaaggcctgagtgtgtgcagcctcctcttccgcccaccagatccagccagttcccttcagtcaggcttgtatgacctgctgaaggttcgcctcttacgcaatggagattgacaggatttta

SEQ ID NO: 1547 - DNA, 1140 bp, Rattus norvegicus
ggatcctaacttcttcccaagcaccagtcactggagacataggagaggcaagaagcctctgggcaactgataaggattccccgcacccaggggaggcgatccccaagcccagcctctcagggtcctgacaagccatgctgcggagagcaatcacaggccagccaatgacagctgctccaagggcgtgtccttacctcctgcacatataaatgaaacttgctgcggggccaatacattctcattctgatagactcaggaagcaatcatggtgctctctgcagctgacaaaaccaacatcaagaactgctgggggaagattggtggccatggtggtgaatatggcgaggaggccctacagaggtaacatcaggaccctgttctttaaggacagcaggatccaaaccggaccagggactcagtgggtagctcctaagtgtgctttcccgtggcctcaacttatctctccttctcacaggatgttcgctgccttccccaccaccaagacctacttctctcacattgatgtaagccccggctctgcccaggtcaaggctcacggcaagaaggttgctgatgccctggccaaagctgcagaccacgtcgaagacctgcctggtgccctgtccactctgagcgacctgcatgcccacaaactgcgtgtggatcctgtcaacttcaaggtgtgagctcagacctggcagggggcacctgggaccttcaaggatcccttggggcagtggtgaggggcacagggggagggggaaggggttcctcatgcccagggcagggaacacagtgttccaggaaggggagcttacccagcagggtgtctactactagggactgacccttcctgtctctgcagttcctgagccactgcctgctggtgaccttggcttgccaccaccctggggatttcacacctgccatgcacgcctctctggacaaattccttgcctctgtgagcaccgtgctgacctccaagtaccgttaagccacctcctgtcgggcttgccttctgaccaggcccttcttccgtcccttgcacctgtctttgaataaagcaaaagtaggaagaatcccgtgtgcctgtttctcacatgtgcaaaggtgacaatgtttggtatgggaaaatcctcc

SEQ ID NO: 1548 - DNA, 2328 bp, Rattus norvegicus
cacaaccccttctttttccgttcttggaaaatggtgtccaagctcacgtctctccagcaagaactcctgagtgccctgctgagctccggagtcaccaaggaagtgctgatccaggccttggaggaattactgccgtccccgaatttcggggtgaagctggagacactgcccctgtcccccgggagcggggcggatctcgacaccaagccggttttccatactctcaccaatggccacgccaagggccgcttgtctggggacgagggctcagaggacggcgacgactatgacactcctcccatcctcaaagagctccaggcgctcaacaccgaggaggccgcggagcagcgggccgaggtggaccggatgctcagtgaggacccatggagggccgccaaaatgatcaagggatacatgcaacagcacaacatcccccagagggaggtggttgatgtcacaggcctgaaccaatcccacctttctcaacacctcaacaagggcacccccatgaagacccagaagcgagctgccctgtacacctggtacgtcagaaagcaacgggagatcctccgacagttcaaccagacagtccagagctctggaaacatgacagacaaaagcagtcaggatcagctgctatttctctttccagagttcagtcaacagaaccagggccctgggcagtcggaggacgcctgctctgagcccaccaacaagaagatgcgccgcaaccggttcaaatgggggcccgcatcccagcaaattttgtaccaggcctacgaccggcaaaagaatcccagcaaggaagagagggaggccttagtggaggagtgtaacagggcagaatgtttgcaacgaggggtctccccctccaaagcccatggcctaggctccaacttggtcacggaggtccgtgtctacaactggtttgcaaaccgccggaaggaagaggcattcagacagaagctggccatggatgcctatagctccaaccagacgcacaacctgaaccccctgctcacccatggctcccctcaccaccagccaagctcctctccacccaacaagttgtcaggagtgcgctacagccaaccgggaaacaatgaggtcacttcctcttcgacaatcagtcaccatggtaacagtgccatggtgaccagccagtcagttttacaacaagtctccccggccagcctggacccaggccacagtctcctctcacctgacagtaaaatgatctcggtgtctggaggaggactgcccccggtcagcaccttgacgaatatccacagcctctcccaccacaatccccagcaatctcaaaacctcatcatgactcccctgtccggagtcatggccattgcacagagcctcaacacctcccaagcccagggtgtcccagtcatcaacagtgtggctagcagcctggcagccctacagcccgtccagttctctcaacagctgcacagccctcaccagcagcccctcatgcagcagagcccaggcagtcacatggcccagcagcccttcatggctgcggtgactcagctacagaactcccacatgtatgcacataagcaggagccccctcagtattcccacacctcccggttcccatctgcaatggtggtcacagataccagtagcatcaataccctcaccagcatgtcttccagtaaacagtgtccactgcaagcctggtgatacccacataaccactcactttgtgcacagcaacgaggaccccattttccacaccatcagtttctgggcatctgtcatagagaagtccagcgacctgacaggcacctgggaagccaggagagatccctgcttacctgacatctgccggggacctccgacaagcccaagccactctcaggaggtgcagcccgaagcccagcttctcttctttgcagtattgtcgtaatgcctctcccaagatgccaagtgcccttgtttctcccagaggtggccggtgcaaaatggtgcaacaggaatcgagaagcccatggagtttccactgcaatccgtcattgaacaaactgatgcaaaaacttgaatctgttactgaaataagatgaggaccgaggagggtgtgtgctactgaactgagccagacactgtaaataactgacagacccccctctcccatcccagtgtctcaagatttcttctaaagaagtaaatttgtcaatgggtgtaaactatcaactactgtattaagtgcaatttttccttccacagatatctacccctgcccgatataatactaaagtgtctatcacttttcttgtaaaggtagagttaaattccaaaaaaaaaaaa

SEQ ID NO: 1549 - DNA, 1758 bp, Rattus norvegicus
cgacagggggctgaggggtgggtagaggagaatgcgactctctaaaaccctcgccgacatggacatggctgactacagtgctgccttggacccagcctacaccaccctggagtttgaaaatgtgcaggtgttgaccatgggcaatgacacatccccatctgaaggtgccaacctcaactcatccaacagcctgggtgtcagtgccctgtgtgccatctgtggcgatcgggccactggcaaacactacggagcctcaagctgtgacggctgcaagggattcttcaggaggagcgtgaggaagaaccacatgtactcctgcaggtttagcaggcagtgcgtggtagacaaagataagaggaaccagtgtcgttactgcaggctcaagaagtgcttccgggctggcatgaagaaagaagccgtccaaaatgagcgggatcggatcagcacgcggaggtcaagctacgaggacagcagcctaccctccattaatgcgctcctgcaggcagaggtcctgtctcagcagatcacctcccccatctctgggatcaatggcgacattcgggccaagaggattgccagcatcacggatgtgtgtgagtctatgaaggagcagctgctggttctggtcgaatgggccaagtacatcccggccttctgtgaacttcttctggatgaccaggtggcgctgctcagagcccacgctggtgagcacctgctgcttggagccaccaagaggtccatggtgttcaaggatgtgctgctcctaggcaatgactacatcgtccctcggcactgtccagagctagcagagatgagccgtgtgtccattcgcatcctcgatgagctggtcttgcccttccaagagctgcagatcgatgataatgaatacgcctgcctcaaagccatcatcttctttgacccagatgccaaggggctgagtgacccaggcaagatcaagcggctgcggtcacaggtgcaggtgagcctggaggattacatcaacgaccggcagtatgactctcggggtcgttttggagagctgctgctgctcctgcccactctacagagcattacctggcagatgatcgagcagatccagttcatcaagctctttggcatggccaagattgacaacctgctgcaggagatgctgcttggagggtctgccagtgacgcgccccacgcccaccaccccctgcaccctcacctgatgcaagaacacatgggcaccaatgtcatagttgccaacacgatgccctctcacctcagcaatggacagatgtccacccctgagactccacagccatcaccaccaagtggctctggatctgaatcctacaagctcctgccaggagccatcaccaccatcgtcaagcctccctctgccatcccccagccaacgatcaccaagcaggaagccatctagcaagccgccggggggtgggggtgaggcttctgctggctcacaccctcagagagcgcctgggtgtaacttagtcacggcaaagaggatgtgacaagagggaccagtcccagagcagccactgaaagggcttgtaggcccaaaaacatgcgctgaggatcgcatgcattgccacccctgaccccacatccggagggcagggctttgccttgaggagaccccggcggggggatgtcttccgctgcctggactcttctcaagttgaagctgccgtcttcatcttcccctcatatcttccctcaacttcttcacccctaaaggacaaccatctgcag

SEQ ID NO: 1550 - DNA, 922 bp, Rattus norvegicus
tctttttcttcgggaaaacaccaaatggcggatgacgccggtgcagcgggagggcccggaggacccgggggcccaggattaggaggccgcggcggcttccgcggaggattcggcagcggccttaggggccgcggtcgtggccgaggccgtggccgcggtcgaggccgcggggctcgtggaggtaaagctgaagacaaggagtggatccccgttaccaagctgggccgcctggttaaggacatgaagatcaagtccttggaggagatctacctgttctccctgcccattaaggagtctgagattattgactttttcctgggtgcatctctaaaggatgaagttctgaaaatcatgccagtgcagaagcagactcgggctggccagcggaccaggttcaaggcctttgtcgctattggggactacaatggccacgttggtcttggtgttaagtgctccaaggaggtagccactgccatccgaggggccatcatcctggccaagctttcgatcgtcccagtgcggagaggctactgggggaacaagattggcaagccccacactgtgccatgcaaggtgacaggccgctgtggctctgtgctggttcgtctcatccctgcccccagaggcactggcattgtctctgctcctgtgcccaagaagctactgatgatggccggtatagatgactgctacacttcagccaggggctgcactgccaccctgggcaactttgccaaggccacctttgatgccatctccaagacctacagctacctgacccctgacctctggaaagagactgtgttcaccaagtctccttatcaggaattcactgaccatcttgtgaaaacccacaccagagtctctgttcagaggacccaggctccagctgtggctaccacataagggtttttatacaaga

SEQ ID NO: 1551 - DNA, 2674 bp, Rattus norvegicus
  misc_feature (1)..(2665): n = a or c or g or t
cgcggagagttccaggctgggaccggactctggacagcgcacgctcgatggctgcgcacgcctggccgacggccgccttgctgctgctgctggtggactggctgctgctgcggcccgtgctcccgggaatcttctccctgttggttcccgaggtgccactgctccgggtctgggccgtgggcctgagtcgctgggctatcctgggactaggggtccgcggggtcctcggggtcaccgcgggagcccgtggctggctggctgctttgcagccgctggtggcggcgctgggtttggccctgcctggacttgcctcgttccgaaagctgtccgcctggggagcactccgggagggtgacaacgctggactgctccactggaacagtcgcttagatgccttcgttctcagttatgtggccgcattgcccgcagctgccctgtggcacaagttggggggcttctgggcgcccagtggccacaagggcgctggagacatgctgtgtcggatgctaggcttcctggactccaagaaggggcgtctccacctggttctggttctcttgatcctctcctgccttggggaaatggccattcccttcttcacaggccgcatcactgactggatccttcaggataagacagcccccagcttcgcccgcaacatgtggctcatgtgtattcttaccatagccagtacagtgctggagtttgcaggagatggaatctacaacatcaccatgggccacatgcacagccgcgtgcatggagaggtgtttcgggccgtccttcaccaggagacaggatttttcctgaagaacccaacaggttccatcacatctcgggtgactgaggacacctccaacgtgtgcgagtccattagtgacaagctgaacctgttcctgtggtacctggggcgaggcctgtgtctcctggcgttcatgatttgggggtcattctacctcactgtggtcaccctgctcagcctgcctctgcttttccttctgcccaggaggctggggaaagtgtaccagtcactggcagtgaaggtgcaggagtctctagcaaagtccacgcaggtggccctcgaggccctgtcggcgatgcctaccgtacggagctttgccaacgaggagggagaggcccagaagtttaggcagaagttggaagaaatgaagccgctaaacaagaaagaggccttggcttacgtcactgaagtctggaccatgagtgtctcgggaatgctgctgaaggtgggaattctgtacctcggtgggcagctggtggtcagaggggctgtcagcagcggcaacctcgtctcctttgttctctaccagcttcagttcaccagggccgtggaggtcctgctctccatctatccctccatgcagaagtccgtgggcgcttcggagaaaatattcgaatacctggaccggactccctgctctccgctcagtggctcactggcacctttaaacatgaaaggcctcgtcaagttccaagatgtctcctttgcctacccaaaccatcccaacgtccaggtgcttcaggggctgacttttacgctgtatcccgggaaggtgaccgccttggtgggacccaatgggtcagggaagagcaccgtggccgccctgctgcagaacctgtaccagcccaccgggggcaaggtgctcctggatggcgagcccctggtccagtatgatcaccactacctgcacacgcaggtggccgcagtgggacaagagccactgctatttggaagaagttttcgggaaaatattgcctatggcctgacgcggactccaaccatggaggaaatcacagctgtggccatggagtccggagcccacgatttcatctctggattccctcagggctatgacacagaggtaggtgaaactgggaaccagctgtcaggaggtcagcgacaggcggtggccttggctcgagccttgatccggaagccacgcctgcttatcttggacgatgccaccagtgccctggatgctggcaaccagctacgggtccagcggctcctgtatgagagccccgagtgggcctctcggacggttcttctgatcacccagcagctcagcctggcagagcgggcccaccacatcctcttcctcaaagaaggctctgtctgcgagcagggcacccacctgcagctcatggagagaggagggtgttaccggtccatggtggaggctcttgcggctccttcagactgacgggcttctggactgcaagctgcgcgagtccctccccctgctgtcctctgctctgtgtggcggagaacctgggagcaaagattttaccacatccacggagatagttgaggagcgatggtgtttgttacatgaggaaaatgtaacctctaggagatgcccggaatttaccacnaatgttttcccgccccgccccctgttagacgggggatgggggtaggtaccccaggctaacactgagctgctgagtctcctgtctcccgtggagtttgcatcacggcatgcgcccacaaacctggcttatgtggcgttgggacagaatgagaagaaacgctcaaaatgtacagagaaggggcaaatagcttgcaattaaccaaaggcataggctggcctatgggtgttccgcgggttcttgatatttataataaaactggtgttttgtaaaaaaaaaa

SEQ ID NO: 1552 - DNA, 2106 bp, Rattus norvegicus
gctgagatggggctgtcccagctatggctgtggctgaagcggcttgtgatattcctgcaggtagccttggaggtggctacgggcaaggtgctaatgacactgttcccagagagagtcaagcagaacatcctggccatgggccaaaagaccggaatgaccaggaatccccgattcgcccctgacaactgggtccccaccttcttcagcatccagtacttctggttcgtcctgaaggtccgctggcagagactggaagacagggctgagtatggggggctggcccccaactgcaccgtggtccgcctctcaggacagaagtgcaacgtctgggatttcattcaaggcagcagacccctggtgttgaacttcggcagctgcacctgaccttcatttcttctcaaatttgaccagttcaagagactcgtagacgactttgcctccacagctgacttcctcatcatttacattgaagaagctcacgccacagatggatgggcttttaagaacaacgtggacatcaggcagcaccgaagcctccaggaccgcctgcgggcagcacatctgctgctggccaggagcccccagtgtcctgtggtggtggacacaatgcagaaccagagcagccagctctatgcagctctgcctgagaggctctatgtgatacaggaaggcaggatctgctacaagggtaaacctggcccttggaactacaatcctgaggaagtccgagctgttctggaaaagctttgcatcccacctggacacatgcctcagttctagggggccagcaggaaggtcccccaagcttggtactcctccccaccagtacagatgtcctttagctttgaccttcgttcccagatcaattactagctcagatttttctgatctgaacaaataactacccgggaggcaattcagttcacagcacccaaccagcacaaattgttacaaccagagataaagcaataccgagctgttagcaaaagtaagtgtgcagctttgcaccactcccacaggcggagaccaatccagtgtgtgccccttctggtggaagggtactcatgcttggttggctgacttctgaagtgtagtgactcatgatgatgacgtcaaaagctcaatccatttgcccaagtttgccactcatagaatcagttgtttagtaccaagcgacaggcaggcgtatttctacttgtaggaaccaaagacattggaaacacttttctggccctaagattgaaatccgttaatattgttggtgataggtgtttccatggcaacctataatctaattctgctccctctaccatctttgaatagattgcagagaaatctggctctctggtactgacacaaaagctttataactttaactaaaccaaatcacaggcgccagcaaaagctgccattcccctgctgtaactctgttccactggcgcccagtctcttactggtctttcatgttagatggctttggactgacgggtagccatgggttcatctgtcatgtctgcttctttttatatttgtttatgatggtcacagtgtaaagttcacacagctgtgacttgatttttaaaaatgtcgggaagatgcagcaagctaacgattaaaatccgtcaggctatttttgaatggctccggtgtgatccttacaatttcctttctgacttgtgtatgtgggcctgctctgccgtcttttccgatagcccacgtgtaatgtaatcagctaaggcatcgtttgcctggagggaccccgtcctggaggaagaagctcgtatgtggcacgcatccaacatgttgtcctgtgaagtgttgtggaagggacgtggctgttcacgtcacagcaaagcacctttaggggtgatgcgtgaatggacctggggagcattctccaggcatccaaacagttcctccttgctctgccttagggctacacccaatactgtaacattgcatttatgtatggatttaggtgagtcaggatctagctataaagtcgagagtggctgtgaacttacaatcttcagactcagagtagctgggattccaggtctgtccccctatataaaaaatgcttttgacctcttgaaaaaaaaaaaa

SEQ ID NO: 1553 - DNA, 499 bp, Rattus norvegicus
ctctttccggacgctcaagatgtcgaagcgaggacgtggtgggtcctccggagcgaaattccggatttccctgggtcttccggtaggagctgtgatcaactgtgctgacaacacaggagccaaaaacctgtatatcatctctgtgaagggaatcaagggacggctgaacagacttcctgctgctggtgtgggcgacatggtgatggccacagttaagaaaggcaaaccagaactaaggaaaaaggtacatcctgcagtggtgattcgacaacgaaagtcatatcgaagaaaagacggggtgttcctttattttgaagataatgcaggggtcatagtaaacaataaaggcgagatgaaaggttctgctatcacaggtccagttgcaaaggagtgtgcagacttgtggcccaggattgcatccaatgcaggaagcattgcctgattctccagtgtgtttgtaaaatatattcattaaagtcttctctctgaaaaaaaaaaa

SEQ ID NO: 1554 - DNA, 628 bp, Rattus norvegicus
cctgttagcggccagaggtaacctgtgaagatggttcgctactcccttgacccagaaaaccccacgaaatcatgcaagtcaagaggctcaaaccttcgtgttcactttaagaacacccgggaaactgcccaggccatcaagggtatgcatatccgcaaagccaccaagtatctgaaggatgtcactttaaagaagcagtgtgtgccattccggcggtataatggtggagtcggtaggtgcgcccaggccaaacagtggggctggacacagggacggtggccaaaaaagagtgctgaatttttgctgcacatgcttaaaaatgcagagagtaatgctgaacttaagggtttggatgtagactctctggtcattgaacacatccaggtgaacaaggctcctaagatgcgcagacgaacctacagagctcacggccggattaacccatacatgagctccccctgccacatcgagatgatcctcactgagaaggaacagattgttccaaagccagaagaggaggttgcacagaagaaaaagatatcccagaagaaattgaagaaacaaaagctcatggcacgggaataaattcagcataaataaatgcggataaagtaaaaaaaaaaaaaaa

SEQ ID NO: 1555 - DNA, 744 bp, Rattus norvegicus
ctcttcctgtctgtgccagaactgcgcgtggtccgcgccgatcgactgagaagcccggtttgcgctctcagaatgactgaatgggaaacagccacacccgcggtggcagagaccccggacatcaagctctttgggaaatggagcactgatgatgtgcagatcaacgatatttctctacaggattacattgctgtgaaggagaagtatgccaagtacctgccccacagtgcaggacggtatgctgccaacggtttccgcaaagcacagtgtcccatcgtggagcgccttactaactccatgatgatgcacggtcgtaacaacggcaagaagctcatgactgtacgaattgtcaagcatgcctttgagatcatccacctgctcactggtgagaaccctctgcaggtcctggtgaatgctatcatcaacagtggcccccgagaagactcaacacgcattgggcgggctggaacagtgagacggcaggctgtggatgtatccccacttcgccgagtgaatcaggccatctggctgctgtgcacgggggctcgtgaggctgctttccggaacatcaagaccatcgctgagtgccttgcagatgagctcattaatgctcgcaagggctcctccaactcctatgctatcaagaagaaagatgaactggagcgtgtggccaagtctaaccgctgatttcccagctgctgcctaataaattgtgtgccctttgggacagttacatcaaaaaaa

SEQ ID NO: 1556 - DNA, 497 bp, Rattus norvegicus
aaagttgctgctaggcgctcgaaagcgagcacctcatctcagagatctggagcggccgcgcttgcggagctgtcaccatgcctctggctagagatctattacacccttccttggaagaggaaaagaaaaaacataagaagaaacggctggttcagagcccaaattcttacttcatggatgtgaaatgtccaggttgctacaagattactacagttttcagccatgctcagacagtggttctttgtgtgggttgttcaaccgtgctgtgccagcccacaggagggaaagccaggctcacagaaggctgttcatttagaagaaagcaacactaatcatctatacaagttcctgaattcgtgtttttcacagaaagccttatcaactttagttactctaccaagacaatgtaattattgtttgattttataaagtctacaacaatgatctcctattttggtgtcagtttttcaataaagttttacttatgaacaagttca

SEQ ID NO: 1557 - DNA, 15231 bp, Rattus norvegicus
atggtggctggcatgctcatgccactggaccagcttcgggccatctatgaggtgctctttcgtgagggggtgatggttgccaagaaggaccggcgaccccgaagcctgcatccccatgtgcccggcgtcaccaatctacaggtcatgcgtgccatgacctcgctgaaagctcggggcctggtgcgggagacctttgcctggtgccacttctactggtacctgaccaacgagggcatcgaccacctacgccagtacctacacctgccaccggagatcgtacctgcctctctgcagcgtgtgcgccgccctgttgccatggtgatgcctgcacgtcgtcgctccccccatgtgcagaccatgcaaggtcccttaggctgtccaccaaagaggggccctctgccagctgaggaccctgcccgggaggagcggcaggtctatcgcaggaaggagcgtgaggaaggggcacctgaaacccctgtggtgtctgccaccatcgtggggaccctggccaggcccggcccagagcccaccccagccacagatgaacgagaccgtgtgcagaagaaaacttccaccaagtgggtcaataaacaccttatcaaggctcaaaggcacatcagtgacctgtatgaagacctccgtgatggccacaacctcatctccctgctggaagtcctctcaggagacagcctgccccgagagaaggggaggatgcgtttccacaagctgcaaaacgttcagattgccctggactatctccgacatcggcaggtgaagttggtgaacatcagaaatgatgacatcgccgatggcaaccccaagctgaccctgggcctgatctggacaatcatcctgcacttcaagatctcagacattcaggtgagcggccagtccgaggacatgacagccaaggagaagctgctgctgtggtctcagcgtatggtagagggctaccaaggcctgcgctgtgacaacttcaccaccagctggcgcgacggccggctcttcaatgctatcatccacaggcacaagcccatgctcatagacatgaataaagtgtaccgacagaccaacctggagaacctagaccaggccttctccgtggcagagcgggacctgggagttaccaggctcctggacccagaagatgtggatgtccctcagcctgatgagaagtccatcatcacctacgtttcatccctgtatgatgccatgccccgtgtgccgggcgcacaggatggagtgagggccaatgagctgcagcttcgttggcaagagtaccgggagcttgtgctgctgctgctacagtggatccggcaccacaccgctgcttttgaggagcgcaagttcccctccagctttgaggagattgagatcctatggtgccagtttctgaagttcaaggagacagaacttcctgccaaggaggcagacaagaaccggtccaaaggcatctaccagtctttggagggagcagtacaagcaggccagctcaagattccccctggctaccacccgctagacgtggaaaaggagtggggcaagctgcacgtggccatcctggagcgggagaagcaactccggagcgagtttgagaggctggagtgtcttcagcgcattgtgagcaagctacagatggaggctgggctatgtgaggagcagctgtaccaggcggattccctactgcagtcggatattcggctgctggcctcaggcaaggcggcacagcgggctggggaagtggagagagacctggacaaggctgatggtatgatccggctgttgttcaatgatgtgcagacccttaaagatgggcggcatccacagggtgaacagatgtaccggagggtgtatcgtctgcatgagcgcctggtagccatccgcactgaatacaacctccggctgaaggcaggggtgggtgcccctgtgacccaggtgaccctgcagagcacacagaggcgcccagagctagaggactccacactgcgttacctgcacgacctgctggcatgggtggaggagaaccagcgtcgaatagacggtgctgagtggggcgtggacttgcccagtgtagaggcacagctgggcagccaccgaggcatgcatcagtctattgaggaattccgggccaagatcgagcgggctcggaatgatgagagccagctctcccctgccacccgaggtgcctaccgagactgcctgggccgcctggacctgcagtatgcaaagctgctgaactcctccaaggcccgcctccggtccctggagagcttgcatgggtttgtggcggcagctaccaaggagctgatgtggctgaatgagaaggaagaggaagaagtgggctttgattggagtgaccgcaacaccaacatggctgccaagaaagaaagttactcggccctgatgcgtgagctggagatgaaggaaaagaaaattaaggagatccagaacacgggggacaggttgctgcgggaagaccatcctgcccggcccacagtggagtccttccaggctgccctgcagacacagtggagctggatgctgcagctgtgttgctgcattgaagcgcacttgaaagagaacacagcctacttccagttcttctcagatgttcgggaggctgaggaacagttgcagaaactacaggagacgttacgcaggaagtacagctgtgaccgctccatcactgtcacaaggcttgaggacctgctgcaggatgcccaggatgagaaggagcaactgaatgagtacaaagggcacctctcaggcctggccaagcgggccaaggctattgtgcagctgaagccacgcaaccctgcccaccctgtgcggggtcacgtgcccctgctagctgtgtgtgactacaagcaggtggaggtgactgtgcacaagggtgaccaatgccagctggtgggccctgcacagccgttccactggaaggtgctcagtagttccggcagtgaggctgccgtgccttctgtgtgctttcttgtgccgccacccaaccaggaggcccaggaagctgttgctaggctggaggcccagcatcaggccctggttactctgtggcaccagcttcacgtggacatgaagagtcttctggcatggcagagcctcaatcgtgacatacagctcatccggtcctggtccctagtcacgttccgcacgctgaagcccgaggagcagcggcaagctctgcgcaacctggagttgcactaccaggccttccttcgagacagccaggacgctggtggctttgggcccgaggaccggctggtggcagagcgcgaatatggatcttgtagtcgccactaccagcagctgctacaaagcctggagcagggtgagcaggaagagtctcgctgtcagcgatgcatctcggagctcaaggacattcggctgcaactggaggcctgtgagactcggactgtgcaccgtctgcggctgccactggataaagaccccgcacgggagtgtgcccagcgcatcgctgagcaacagaaagcacaggctgaggtggaggggctgggcaagggagttgcccggctgtctgctgaggctgagaaagttctggccttgccagagccgtcacctgctgcaccaactctgcgctcggagttggaattgaccctgggcaagctggaacaggtcagaagcctgtctgccatctacttggagaaactcaagaccatcagcttggtaattcgcagtacccagggggctgaggaggtgcttaaaacacacgaggagcacctgaaggaggcccaggccgtgcctgccacactccaagagctcgaagtcaccaaggcttcactaaagaagctgcgggcccaggcggaggcacagcagcctgtattcaacaccctacgagatgagctgaggggggcacaggaagttggtgaacggctacagcagcggcatggtgagcgggacgtggaagtagagcgctggcgagaacgtgtcactcagttgctggagcgctggcaggctgtgctagcccagactgatgtgcggcagcgggagcttgaacagctgggccgccaacttcgctactaccgtgaaagtgcggatccgctgagctcctggctgcaggatgccaagagccggcaagaacagatccaggctgtgccaatagccaacagtcaggctgcacgagaacagctgcgccaggagaaggccctgctggaggagattgagcgccatggtgagaaggttgaggagtgccagaagtttgctaagcagtacatcaatgcaatcaaggactatgagctccagctgatcacctacaaggctcagcttgaacctgtggcctcccccgccaagaagcccaaggttcagtctggatcggagagcgtcatccaggagtacgtggatctgcgtacacgctacagtgagctgaccacactcacgagtcagtacatcaagttcatcagtgagacactgcgccgcatggaagaggaagagcggctggctgagcaacagcgggcagaggagcgggagcgcctggccgaggtggaggccgcgctggagaagcagcggcagctggctgaggcccatgcccaggccaaggcacaggccgagctggaggcacgagaactgcagcggcgcatgcaggaggaggtgacgcggcgcgaggaggcggcggtggacgcacagcaacagaagcgcagcatccaagaggagctgcagcatctgcggcaaagctcagaggcagagatccaggccaaggcccagcaggtggaggctgcagagcgcagccgcatgcgcattgaggaagagatccgcgtagtccgtctgcagctagagacaactgagcgtcagcgtggaggggcggaggatgagctgcaggctctgcgtgcacgggctgaggaggcagaagcacagaagcggcaggctcaggaggaagccgagcgcttgcggaggcaggtgcaggatgagagccaacgcaaacggcaggcggaggccgagctggccctgcgtgtgaaggcagaagcggaggcagcgcgagagaagcagcgggccctgcaggctctggatgaactgaaactgcaggccgaggaggccgaacggtggctgtgccaagccgaggcagagagggctcgccaagtgcaggtagccctggagacagcgcagcgtagtgcagaagtggagctgcagagcaagcgtccgtcctttgcagagaagaccgcacagttggagcgcacgctgcaggaagagcacgtgacagtgacacagctgcgggaggaggcggaacggcgggcacagcagcaggctgaagccgagcgagcccgtgaggaagccgagcgggagctggagcgctggcagctgaaggccaatgaggcgctgcggctgcggctgcaggcagaggaggtggcacagcagaagagcctggcccaggccgatgcggagaagcagaaggaagaggcagaacgggaagcccggcggcggggcaaggcagaggagcaggccgtgcggcagcgagagctggctgagcaggagctggagaagcagcggcagctgacagagggcaccgcccagcagcgcctggctgccgagcaggagctgattcgcctgcgggcagagacggagcaaggtgagcatcagcggcagctgctggaggaagagctggcccggctacagcacgaagcgacagcagccacacagaagcgccaggagctggaggctgagctggcgaaggttcgggcagagatggaggtactgctggccagcaaggcacgagccgaagaggagtctcgctccaccagtgaaaagtccaagcagaggctggaagctgaggcagggcggtttcgagagctggctgaggaggctgcccgcctgcgtgctctggccgaggaggcaaggcggcaccgggagttggccgaggaggacgcggcacgccagcgggccgaggcggacggagtgcttacggagaagctggctgccatcagtgaggccacaaggctcaagacggaggcagagattgcactcaaagagaaggaggccgagaacgagcgcctgaggcgcctggctgaagatgaggccttccagcggcgccggctggaggagcaggcagcacagcacaaggcagacatagaggagcgcctggcccagctgcgcaaggcatccgagagcgagctggagcgacagaaggggttggtggaggataccctgcggcagcggcggcaggtggaggaggagatcatggctctgaaggcgagcttcgagaaggccgcggctggcaaggcagaactggagctggagcttggccgcatccgcagcaatgccgaggacaccatgcgcagcaaggagctggccgagcaggaggcagcgcggcagcggcagttggcagctgaggaggagcagaggcgccgggaagccgaggagcgggtgcagaggagcctggcagcggaggaggaagccgcacggcagcgcaaggtcgcactggaggaagtcgagcggctcaaggccaaggttgaggaagcgcggcgcctgcgagagcgagctgagcaggagtctgcgaggcagctgcagctggcccaggaggctgcccagaaacggctgcaggcggaggagaaggcgcacgcctttgtggtgcagcagcgagaagaggagctgcagcagactcttcagcaagagcagaacatgctggagcggctgcggagcgaggcagaggcagcgcggcgagctgctgaggaggcggaggaggcccgggagcaggcagaacgtgaggcagcgcagtctaggaagcaagtggaagaggccgagcggctgaagcagtcggcagaggagcaggctcaggcccaggcccaggcgcaggcggctgcagagaaactgcgcaaggaagcggagcaggaggcggcgcgtcgggcccaggcggagcaggctgcgttgaaacagaagcaggcagccgacgcggagatggagaagcacaagaagtttgcagagcagacgctacggcagaaggctcaggtagagcaggagctgaccacgctgaggctgcagctcgaggagaccgaccaccagaagagcatcctggatgaggagctgcagcggctaaaggctgaggtaacagaggcagcccggcagcgtagccaggtagaggaggagctcttctctgtccgcgtgcagatggaggagctgggcaaactcaaggctcgcattgaagctgaaaaccgggcactcatccttcgtgacaaggacaacacacagcgcttcctggaggaggaggccgagaagatgaaacaggtggcagaggaagctgcacggttgagcgtagctgcccaggaggcagcaaggctgcggcagctagccgaggaggacctggcccagcagcgggccctggcggagaagatgctgaaggagaagatgcaggcggtgcaggaagccacaaggctcaaggctgaggctgagctgctgcagcagcagaaggagctggcacaggagcaggcccggcggctgcaggcggacaaggagcaaatggctcagcagttggtagaggagacacagggtttccagcggaccctggaggctgagcggcagcggcagctagaaatgagcgcagaggctgaacgcctcaagttgcgcatggctgagatgagccgggctcaggcccgtgcagaggaggatgcccagcgcttccggaagcaggctgaagagatcggcgaaaagctgcaccgcactgaactcgctacacaggagaaggtgacattggtgcagactctcgagatccagcgacagcagagtgaccaagatgccgagcgtctgagggaggccattgctgagctggagcgtgagaaggagaagctcaagcaggaggcgaagttactgcagctcaagtctgaggagatgcagactgtgcagcaggagcagatactgcaggagacacaggccctgcagaagagctttctctctgagaaggacagcttgctgcaacgcgaacgcttcatcgagcaggagaaggccaagctggagcagcttttccaggacgaggtggcaaaagcaaaacagctgcaggaggagcagcagcggcagcagcagcagatggagcaggaaaagcaggagctggtggccagcatggaggaggcccggaggcggcagcgtgaggcagaggagggtgtgaggcgcaagcaagaggaactgcagcgtctggagcagcagcggcagcagcaggagaaactactggcagaggagaaccagaggctgcgggagcggctgcagcgcctggaggaagagcaccgagctgcgttggcgcactctgaggagatcgccacctcccaggctgctgccacaaaagcactgcccaatggccgcgacgcacttgatggcccctccatggaggccgagcccgagtacacctttgagggattacgtcagaaggtgccagctcagcagctacaggaagcaggcattctgagcatggaggaactgcagcgtttgacacagggtcacaccacggtggctgagctcacgcagcgggaagatgtgcgccactacctgaagggcggcagcagcatcgcaggattgctcctgaagcccaccaatgagaaactgagtgtctacacagccctacagcggcagctgctcagccctggaacagcccttatcttacttgaggcccaggcagcctcgggcttcctgctggaccctgtccggaaccggcggctgacggtcaatgaggctgtgaaggagggtgtggtgggtcccgagctgcaccacaagctgctgtcagctgagcgtgccgtcactggctacaaggacccttacacaggagaacagatctctctcttccaggccatgaagaaggacctcattgtcagggaccatggcatccgcctgctggaagcccagatcgccacaggtggcatcattgaccctgtacacagccaccgtgttcccgtggacgtggcctaccagcgtggctacttcgatgaggagatgaaccgtgtgctggctgacccaagcgatgacaccaagggcttctttgaccccaacactcacgagaacctcacgtacctgcagctgctggagcgctgtgtggaggaccccgagacaggcctgcgcctcctgccactcacagacaaggctgccaagggtggtgagctggtgtacactgacacggaggcccgtgacgtcttcgaaaaggccacagtgtctgcaccattcggcaagttccagggcaagaccgtgaccatctgggagatcatcaactcagagtacttcacagcggagcagcgacgggacctgctccggcagttccgcacgggccgcatcacggtggagaagatcatcaagattgtcatcacggtggtagaggaacacgagcggaagggccagctctgctttgagggcctccgtgcccttgtgcctgctgcagagctgctggacagtggagtcatcagtcatgaagtctaccagcagctgcagcggggtgagcgctctgtgcgggaagtggccgaggcagacgaggtgaggcaggccctgcggggtaccagtgtcattgccggtgtgtggctggaagaagcagggcagaagctgagcatctatgaggccctgaggagagatttgctgcagccagaggtggctgtggccttgctggaggcccaggctggcactgggcacatcattgaccctgccacgagtgccaggctgactgtggatgaggcagtgcgtgctggcctggtgggtcctgagatgcacgagaagctcttgtcagctgagaaggctgtaacaggctatagggatccctactcgggacagagcgtctcgctcttccaggctctgaagaagggtctcatcccccgagaacagggcctgcgcctgctggatgcccagttatccactggtggcattgtagaccccagcaaaagccaccgtgtgcccctggatgttgcctatgcccggggctacctggacaaagagactaacagggccctgacgtcacccagagacgatgccagagtctaccttgaccccagcacccgggagccagtcacctacagccagctccaacagcggtgccggtctgaccagctgactgggttgagcctactgcccctctcagagaaggccgtccgggcccggcaggaagaggtctactctgagctccaggcccgtgagacattggagaaggccaaggtggaggttcctgtgggcggctttaagggcagggcgctgacagtgtgggagctcataagctcggaatacttcactgaggagcagcggcaggagctgctacggcagttccgcacaggcaaggtcactgtagagaaggtcatcaagattcttatcaccattgtggaggaggtggagactcaacggcaggagagactgtccttcagtggcctccgtgcccctgtgccggccagtgagctcctggcctccaagatcctcagcagaactcagtttgagcagctcaaggatggcaagacatcagtcaaagatctgtcagaggtgggctctgtgcggacactgctgcaaggcagcggctgcctggctggcatctatctggaggactcgaaggagaaagtaaccatctatgaggccatgcgccggggcctcctcagagccagcacagccacactcctgctggaggcccaggcggccactggttttctagtggaccctgtgcggaaccaacgtctgtacgtccatgaagctgtcaaggctggagtggtgggcccggagctccatgagaagctgctgtcggctgagaaggcggtcactggttacaaagatccctactctggcagcaccatctcgctgttccaggccatgaagaagggcttggtcctcagggaccatgccatccgcctgctggaggcccagattgccacaggtggcatcattgaccctgtgcacagtcaccgccttcccgtagatgttgcctaccagcgtggctacttcgatgaggagatgaaccgtgtgctggctgacccaagtgatgacaccaagggcttcttcgaccccaacacccacgagaacctcacgtacctgcagctgctggagcgctgcgtggaggaccccgagacaggcctgcgcctcctgccactcagaggggcagagaagacagaggtggtagaaaccacacaggtgtatactgaggaggagactcggagggcgttcgaggagacgcagattgacatcccaggtggtggcagccacggtggctcctccatgtctctatgggaggtgatgcagtcagacatgatcccagaggaccagcgtgcccggctcatggccgactttcaggctggcagagtgaccaaggagcgcatgatcattatcatcatcgaaatcattgagaagacggagatcatccgccagcagaacctcgcctcctatgactacgtacgccgccgcctcaccgccgaagacctgtatgaggcccggatcatctcccttgagacctacaacctcttccgggaaggcaccaagagcctccgtgaggttctggagatggaatctgcctggcgctacctttacggcacaggatcggtggccggtgtctacctgcctggctctaggcagacgctaaccatctaccaggcccttaagaaggggctgctgagtgccgaggtggcccgcttgctgctggaagcacaggcagccacaggctttctgctggacccagtgaaaggcgagaggctgactgtggacgaggccgtgcggaagggtctggtaggccccgagctgcacgatcggctcctctctgccgagcgagctgtaactggctaccgagacccctacaccgaacagcccatctcactcttccaggccatgaagaaggagctgatccctgccgaggaggcactgaggctgctggatgctcagctagccacaggaggcattgtggacccccgcctgggtttccacctccccctggaggtggcttaccaacgaggctacctcaataaggacacgcatgaccagttgtcagagcccagtgaggtgcgcagctatgtggacccctccacggatgagcgtctcagctacacacagctgctcaagcgttgccgccgtgacgacaacagcggccagatgctgctgccgctctctgatgcccgcaagctgaccttccgcggcctgcgcaagcagatcaccgtggaggagctggtacgctctcaggtcatggatgaggccacagcactgcagctgcaagaaggcctgacctccattgaggaggtcactaagaacctgcagaagttccttgagggtaccagctgcattgctggagtctttgttgatgctaccaaggaacggctgtcggtgtaccaggccatgaagaagggcatcatccgtcccgggacagccttcgagctcctggaagcgcaggcagccaccggctacgtcattgaccctatcaaggggctcaagctgactgtggaagaggccgtgcgcatgggtatcgtgggccccgagttcaaggacaagctgctgtctgctgagcgtgccgtcactggctacaaggacccttactctgggaaactcatctctctcttccaggccatgaagaagggcctgatcctgaaggaccatggcatccgcctgctagaggctcagatcgccaccggtggcatcattgaccctgaggagagccaccgcctgcctgtggaagtggcctataagcgtggtctctttgatgaggagatgaacgagatcctgactgacccctcagatgacaccaagggcttcttcgacccaaacaccgaggagaacctcacatacctgcagctgatggagcgctgtatcactgacccccagactggcctgtgtctcctgccgctgaaggaaaagaagcgggagcggaagacgtcctccaagtcctcagtgcgcaagcgccgcgtggtgattgtggaccctgagacgggcaaggagatgtcagtgtatgaggcctaccgcaagggcctcatagaccaccagacatacctggagttgtcagagcaggagtgcgagtgggaagaaatcaccatctcttcctcggacggcgtcgtcaaatctatgatcatcgaccgccgctctggccgccagtatgacattggtgacgccatcaccaagaacctcattgaccgctcagcactggaccagtaccgcgctggcacactttctatcaccgagtttgccgacatgctctcaggcaacgctggtggcttccgctcccgctcctcctctgtgggctcatcttcctcctaccccatcagttctgctgtccctaggacccagctagcctcctggtctgatcctactgaggagactggcccagtggccggcatcctagacacagagactctggagaaggtgtccatcacagaggccatgcaccgcaacctggtagacaacatcactggccagcggttgctggaggcacaggcctgcaccgggggcatcattgaccccagcactggtgagcgcttcccggtcactgaggctgtcaacaagggcctggtggacaagatcatggtagaccgtatcaatctggcccagaaggccttctgtgggtttgaggacccacgcaccaagaccaagatgtcagctgcccaggccctgaagaagggctggctttactacgaggcaggccagcgtttcctcgaggtgcagtacctgacgggtggtctgattgagcctgacacacctggccgtgtgtctcttgatgaagccttgcaacgtggcactgtggatgcccgcacagcccagaagctgcgtgatgtcagtgcctactccaagtacctcacgtgccccaagaccaagctcaagatctcttacaaggacgctctggatcggagcatggtggaggagggcacagggctgaggctgctggaagccgcggcacagtccagcaagggctactacagcccgtacagtgtcagtggctctggctctactgctggttcacgcactggttcacgcaccggctccagggccggctcccgtcgtggcagctttgatgccactggctctggcttctccatgaccttttcttcttcctcctactcttcctcaggctatggccgccgctatgcctcagggccttcagcctctcttgggggccctgagtctgcagtggcctgatcccccagcctgtatcctgccttcccgctctgcatgtcgccaggctccccgtggaggcgctggggtcttttctttcttcttctttttttttttttttttaacatttaaaggtgtcttcctcccaagcggtgcctaaaatctaaccaaaaagaccagaataacacattaatatatatatatatatgcgatgtccagacagcctgtgtcttgggaaacagggctggcccaggcccagtgaccactccactctccttgggcctccctaatcctttctacctgccactcaccacagctaggtgccttggagaatccagagctgggcactcagcccactactcctgtctctcctgggaggattgccatctgggaaaggcccccagacctctaagccaaccccactggatgtctacctgctggtcctagctgctgaggggaactggggacggtcctgtgagcagacagctgttgagtctcttgaggcctctgccctgagccagctgcttctccccagtgtatacctgaatattcagtgggttttgctggcaaaggaaagatcccaggccaaccatctcttccagcctgcccagagaagccccttccccatgggaagataaggcctggtcctggccccagcctcccgcctggctcctgcagctgccattggagctgtgctttgtagctcactaccccatacttattcccttgagacctgagcctctgcttcagccttccagcctcaactccccttgtaagtgccttctgtgtccttgtacccaggccctaaagacccagacccagggcaagagatggacattctggctgggcggggctggagggttctgcagatctgagaattccttctccagaggcccagggtcttcaagcctgtggaacccctctgggtgctgctgcccaccccactcccagggagccctggccagcccagctgtgctaacataagtacttggccagtgacactctcccttccctggccttggtggctcctacccctgcctccaccctctgagtgagctttgcatgttccactaaccttgagctggtgacaggtggagatgccaggcagaacactaacctgaccatgggcgggggccctgcggtgtccgcccctcaataaaagcaattccaaccttaaaaaaaaaaaaaaaa

SEQ ID NO: 1558 - DNA, 471 bp, Rattus norvegicus
gctagtgacacgaccactcttgagatcaccaccactcctgatgtgaacaccactgctgatgtcaccaccactcctgatgtgaccaccattgctgatgtcaccaccactgctagtatcaccaccactcctgatgtgaccaccacccctgatgtgaccaccactgctgatgtcaccaccactgctggtatcaccaccactcctgatctgaccaccactacgctatttctacccatcctggcctccatggcacaagccatctgtcttcacccgctctacgtcatgctcccctgcaccctggctgcctccctggctttcatgctacctgtggccactccacccaacgccattgtattctcctttggaggcctcaaggtgtctgatatggcccgcgctggattcctgctcaatatcatcggagtgctggctatcacattatccatcaacagctggagtatccccatcttcaagctg

SEQ ID NO: 1559 - DNA, 1547 bp, Rattus norvegicus
gcacaagtttcctgggctggaccatttgagcagagaggattatttgacttcatgctagaagatgaggcctctggcataatcccttacgaccctgacaatcccctgatatctatgtgcccctaccgatgccaatgccatctccgagtggtgcagtgttctgatctgggtctggacaaagtaccctgggaatttccacctgacacaacattgctagacctgcaaaacaacaaaataacagagatcaaagagggggcctttaagaacctgaaggacttgcataccttgatccttgtcaacaacaagatcagcaagatcagcccagaggcatttaaacctctagtgaagttggaaaggctttatctgtctaagaaccacctaaaggagctgcccgaaaaattgcccaaaacactccaggagcttcgactccacgacaatgagatcaccaaactgaagaaatctgtgttcaatggactgaaccgtatgattgtcatagaactgggcggcaacccactgaaaaactctgggattgaaaatggagccttgcagggaatgaagggtctcggatacatccgcatctcagacaccaacataactgctattcctcaaggtctgcccacttctatcagtgaactgcatctggatggcaacaagatagccaaagttgatgcagccagcctgaaaggaatgtctaatttgtctaagctgggtttgagcttcaatagcatcaccgttgtggaaaatggcagtctggctaatgttcctcatctgagggagctccacttggacaacaacaaactcctcagagtgcctgctgggctggcacagcataaatatgtccaggtcgtctaccttcataacaacaacatctccgaagttgggcagcatgacttctgcctcccttcataccagactaggaagacttcctacactgccgtgagtctttatagcaaccctgtccggtattggcaaattcacccacacaccttcagatgtgtcttcgggcgctctaccattcaacttgggaactacaagtaactcccaaacagcctcatttttataatcgggaacaaaaaaaccaatctgtcaatattattgctaaaaagaaaaaaatattttgaaaaagaaagaatgctagattctggaaattcaagtatagcgcggatgcctttcccgtatgacttatcatgcatcaagccaaatatacagattgaataattacctacaataaaaatattttatctgtagtattcagaatcacttttaaaattttctgtagatgtgaactgaggtatcgaagtctgatgtaatcatagatgtcaacatttaataaagctaaaaggaacagaatacaaagtcttctgtaattcatagagctaaattgactcttttgacataaagtcaaatgtagaactctagcaatgtattaatctcctttattattggtaaagtcttatttgaatatctaagttcaacatgggctatgtaaaattttcactgtcatactgaaaaacaataaaatttaaaaaatgcattcaaaaaaaaaaaaa

SEQ ID NO: 1560 - DNA, 1184 bp, Rattus norvegicus
ctcggcctctaagctcccggagtcgctgcgtccgcgcagtccggaactcgtgtggccaccgcgggaacagagagggtccgttgtaacctgttgagtaactatggaggactatatcaaaatagagaaaatcggagaagggacttatggtgtggtatataaaggtagacacaggactactggccagatcgtggccatgaagaaaatcagacttgaaagcgaggaagaaggagtgcccagtacggcaatccgggaaatctctctgttaaaagaacttcgacatccaaatatagtcagcctgcaggatgtactcatgcaggactccaggctgtatctcatcttcgagttcctgtccatggatctcaagaagtacctggactctatccctcctggccagttcatggattcttcgctcgttaagagttacttgtaccaaatcctccaggggattgtgttttgtcactcccgacgagttcttcacagagacttgaaacctcaaaatctattgattgatgacaaaggaacaatcaaactggcagatttcggccttgccagagcgtttggaataccgataagagtgtacacacacgaggtagtgacgctgtggtaccggtcgccagaggtgttgctgggctcggctcgctactccaccccggttgacatctggagcatagggaccatatttgcagagctggcgaccaagaagccgcttttccacggcgactcagagattgaccagctcttcaggatcttcagagctctgggcacccctaacaacgaagtgtggccagaagtagagtccctgcaggactacaagaacactttccccaagtggaagccggggagcctcgcgtcccacgtcaagaacctggatgaaaacggcttggacttgctctcgaaaatgctggtctatgatccagccaaacgaatctctggaaaaatggcccttaagcacccatactttgacgacttggacaatcagatcaagaagatgtaaccctctggaagtcccgccctgctgtggcagggaagatcgtggcgtttactgttggctcttcctgtcttgtatagttttcttttctttgtctgtaaaccatcatctggacttttcctattttcctacgtataacttaattaacatgtaaatattattccatatgaatttaaatataattctgtatatgtgt

SEQ ID NO: 1561 - DNA, 1194 bp, Rattus norvegicus
ttcgccgcgcccgcgcccgcgcaccacgacttcctttccgacctcttcgccgacgactacggcgccaagccgagcaagaagccgtccgactacggttacgtgagcctcggccgcgcgggcgccaaggccgcaccgcccgcctgcttcccgccgccgcctcccgccgcactcaaggccgagccgggcttcgaacccgcggactgcaagcgcgcggacgacgcgcccgccatggcggccggcttcccgttcgccctgcgcgcctacctgggctaccaggcgacgccgagcggcagcagcggcagcctgtccacgtcgtcgtcgtccagcccgcccgggacgccgagccccgccgacgccaaggccgcgcccgccgcctgcttcgcggggccgccggccgcgcccgccaaggccaaggccaagaaggcggtggacaagctgagcgacgagtacaagatgcggcgcgagcgcaacaacatcgcggtgcgcaagagccgcgacaaggccaagatgcgcaacctggagacgcagcacaaggtgctggagctgacggcggagaacgagcggctgcagaagaaggtggagcagctgtcgcgagagctcagcacgctgcggaacttgttcaagcagctgcccgagccgctgctggcctcggcgggtcactgctagcccggcgggggtggcgtgggggcgccgcggccaccctgggcaccgtgcgccctgccccgcgcgctccgtccccgcgcgcgcccggggcaccgtgcgtgcaccgcgcgcacctgcacctgcaccgaggggacaccgtgggcaccgcgcgcacgcacctgcaccgcgcaccgggtttcgggacttgatgcaatccggatcaaacgtggctgagcgcgtgtggacacgggactgacgcaacacacgtgtaactgtcagccgggccctgagtaatcacttaaagatgttcctgcggggttgttgctgttgatgtttttgtttttgttttttgttttttgttttttttttggtcttattatttttttgtattatataaaaaagttctatttctatgagaaaagaggcgtatgtatattttgagaaccttttccgtttcgagcattaaagtgaagacattttaataaacttttttggagaatgtttaaaaaaaaaaaaaaaaaaaaaaaaaaaaaaaaaaaaaaaaaaaaaaaa

SEQ ID NO: 1562 - DNA, 498 bp, Rattus norvegicus
tgtgtgcgatcgcggtggatcgctaccatgaaccacacttctcaagccttcgtgaacgctgccactgggggacaacccccaaactacgaaagaatcaaggaagaatatgaggtgtctgaactgggggctccccacggatcggcttctgtcagaactaccgtgatcaacatgcccagagaggtctctgtgcctgaccatgtggtctggtccctgttcaatacgctcttcatgaacttctgctgcctgggcttcattgcctatgcctactctgtgaagtctagggatcggaagatggtgggtgatatgactggagcccaggcctacgcatccactgccaaatgcctgaacatcagctccctggtcctcagcatcctcatggtcattatcactattgttactgtcgtcatcattgctcttaatgctcctcgtctccagacttgatagaggattctggtttctgatcctgacgtgcttcacgctctgctggctgcccttttt

SEQ ID NO: 1563 - DNA, 843 bp, Rattus norvegicus
ctcttttggccttgcttgccggcagactcgccgccatgggccgtgtgatccgaggccagaggaaaggtgccggttctgtgtttcgtgcgcacgtgaagcaccgtaagggagccgcgcgtctgcgtgctgtggacttcgcggagcgacacggctacattaaaggcatcgtaaaggacatcattcatgaccctggccgcggcgctcccctcgcgaaagtagtctttcgtgatccctatcgattcaagaagcggacagagctgttcattgccgcagagggaatccacactggacagtttgtgtactgcggcaagaaggcccagctgaatattggcaatgttttgcccgtgggcaccatgcctgagggtactatcgtgtgttgtctggaggagaagcctggggacaggggcaagctggcacgagcctccgggaactatgctacagtcatctcccacaacccagagaccaagaagacccgagtgaagctgccttcagggtccaagaaggtcatttcctctgctaaccgagctgttgttggtgtcgtggctggcgggggcagaattgacaagcctatcttaaaggctggccgtgcctaccataagtacaaggcaaagaggaactgctggccacgtgtgcggggtgttgccatgaatcctgtggagcatccctttggcggtggtaaccaccagcacattggcaagccttccactatccgaagagatgccccagctgggcgcaaagtgggtctcattgctgctcgccggactggacggctacgtggaaccaaaactgtacaggagaaggagaactagagttcaggagctaataaagtatgtgctttggcta

SEQ ID NO: 1564 - DNA, 585 bp, Rattus norvegicus
tcttcctgttctccaccatggcgcaagatcagggtgaaaaggagaaccccatgcgggaacttcgtatccgcaagctctgcctcaatatctgcgtgggggagagtggagacagactgacccgagcagccaaggtgttggagcagctcacaggccagacccctgtgttttccaaagctagatacaccgtcaggtcctttggcatccggcgaaatgagaaaatcgctgttcactgcactgtccgtggagccaaggcagaggagattctggagaaaggcctgaaggtgcgagagtacgaattacggaagaataacttctcagataccggcaactttggctttgggattcaggaacacattgacctaggcatcaaatatgacccaagcattggcatctatggcctggatttctatgtggtgctgggtaggccaggtttcagcatcgcagacaagaagcgcagaacaggctgcattggggccaaacacagaatcagcaaagaggaggcaatgcgctggttccagcagaagtatgatggcatcatccttcctggcaaataaactttatccaaaggccaataaagttttctca

SEQ ID NO: 1565 - DNA, 1316 bp, Rattus norvegicus
cgagacatatcggcggcgtgtggcggcgagatgtctcacaggaaattctcagctcctaggcatgggtccttgggcttcttgcctcggaagcgcagcagccggcatcgtggaaaagtgaagagcttccctaaggatgacccttccaagcctgttcacctcacagccttcctagggtacaaggctggcatgacccacattgtccgggaagttgaccggccaggatctaaggtgaataagaaagaagttgtggaggctgtgaccattgtggaaaccccacccatggtggttgtgggtattgtgggatatgtagaaaccccacgaggcctccggaccttcaagactgtatttgctgagcacatcagcgatgagtgtaaaaggcgtttctataagaattggcacaaatctaagaagaaggcttttaccaagtactgtaagaaatggcaagatgacacaggcaagaagcagctggagaaggacttcaacagcatgaagaagtactgccaggtcatccgcataattgctcacactcagatgcgcctgcttcctctgcgccagaagaaggcacacttgatggagatccaggtgaatgggggcactgtagctgagaagctagactgggcccgagagaggctggagcagcaggtccctgtgaaccaggtgtttgggcaagatgagatgattgacgtcatcggcgtgacaaagggcaaaggctacaaaggggtgaccagtcgttggcatacaaagaagctgccccgaaagacccacagaggtctgcgcaaagttgcttgtattggagcttggcatcctgcccgtgtagccttctctgtggctcgagctgggcagaaaggctaccatcaccgaacagagatcaacaagaagatttacaagattggtcaaggctacctcatcaaggatggtaagctgatcaagaacaatgcatctactgactacgacctgtctgacaagagcatcaacccactgggtggctttgtccattatggtgaggtgaccaatgacttcatcatgctcaaaggctgtgtggtgggaaccaagaagcgagtgcttactctccggaagtccttgctggtccagaccaagcgtcgggctcttgagaagattgacctgaagttcattgacaccacctccaaattcggacatggtcgcttccagaccatggaggaaaagaaagcattcatgggaccgctcaagaaagatcgcattgccaaggaggaaggtgcctgatgccaggagtactttgtgcagctggtggggtctcatcaataaaatattttcaattaaaaaaaaaaaaaaaaaaa

SEQ ID NO: 1566 - DNA, 1664 bp, Rattus norvegicus
agctagggccatgttttggggctcccgtctgcctttgagagtctttttcgggtcccttcctggccttcttaatacgtggcagagcgtctggaccagaagactacactgtgcaaccaccatgagtcttgacatccagtgtgagcagctgagtgatgcccggtggacagagctccttcccctgatccaacaataccaagtggtcaggctggatgactgtggcctcactgaagtgcggtgcaaagacatcaggtcagcgatccaggccaaccctgccctgacagagctcagcctacgcaccaatgaactgggtgatgctggtgtgggtctggtgctccagggcctgcagaatcccacttgtaagatccagaagctgagccttcagaactgcagcttgacggaagctggctgtggggtcctgcctgatgtgctgcgctctttgtctaccctgcgtgaactacatctcaatgacaaccctctgggggatgaaggcctgaagctgctctgtgaaggactccgggacccccagtgccgtcttgagaagcttcagttggaatactgtaacctcacagctaccagctgcgagcccctggcctcagtgctcagggtgaaacctgactttaaagagctagtattgagcaacaatgacttccatgaggctggtatccacactctgtgccagggcctgaaggattctgcctgtcaactggagtcactcaaactggagaactgtggtatcacatcagccaactgcaaggatctgtgtgatgttgtggcctccaaagcctcactgcaagaactggacttgggcagcaacaagctgggcaacacaggcattgcagcactgtgctcaggactgctgcttcccagctgcaggctgaggactctgtggctctgggactgtgatgtcactgcagaaggctgcaaggacctgtgccgtgtcctcagagccaagcagagcctgaaggaactcagcctagctggcaatgagctgaaggatgagggtgcccaactgctgtgtgagagcctgttagagcctggctgtcagctggagtcactgtgggtaaagacctgtagcctcacagctgcctcttgtccccacttctgctcggtgttgaccaaaaacagttctctgtttgagttgcaaatgagcagcaacccgctgggagactcgggagtcgtggagctttgcaaggccctgggctatccggacacagtgctgcgtgtgctttggctgggagactgtgatgtgacagacagtggctgcagcagccttgccactgtcctgctggccaaccgcagcttgagggaactggacctcagtaacaactgcatgggggacaacggtgtcctacaactgctggagagcctcaaacagcccagctgcatccttcagcagcttgtcctgtatgacatttactggacggatgaggtggaagaccagcttcgggccctggaggaggaaaggccatccctgaggatcatttcctgagatgtacacctctggacacaagatattaatccagccccagaggcagcccaccagatctctggctttggttgtcctagggttggactggcgataagcattgggatcttacttcagtagaaaactttaagacactttataactattaaaatactttgttggcaaaaaaaaaaaaaaa

SEQ ID NO: 1567 - DNA, 785 bp, Rattus norvegicus
gccccgatggctgacctggcggcagcagtgtggtcagtgcaggggaagcttaggtcccagcatgtatgtcccccatcaagcgtcaccgggtgggtttctcagtccctcctgccccaccctactgagaatcctgcaccaggttggctgagccccttggctggacaacaggaagtaggatggtgttggctccacccactttgctgctcttccctgggacaagacagatgggcgctaccacccatctcgagtgaggtcctgagcacttccacctaaggcagacggggctccaacaggcgcctcccccactacactcttcctctagcagggcaccaaggagctcgccttgcccccctctccttttgctcctccctgcccccaaggttctggttccactttttcctctgttcacaaactacctctggacagttgtgttgtgttttttgttcaaatgttcattcttagacacccaccattgctgctaccagcgccagatgtccatcctcccgattttgcctgtaccccccacacaatacactctaggggaagggggggctggtgtgcagcagcaggctggttaccgagtaccccacgctagggaagatggccccgccccgtggatgctgcagcagagtgaggagggggggcccacttggatgggaaaagggtataggaccacctccccttgttgtgggggaggggtggccagtatttgtcccagcctggggctccccctctggtttcctatttgcagttacttgaataaaaaaaaatagccttttctggac

SEQ ID NO: 1568 - DNA, 1796 bp, Rattus norvegicus
gttcacagccactgcgccctcgctctcttcttgcagatcttgcagccgcagcaagccaggccacctcgtccttcgaagccatgtccaccaggtccgtgtcctcgtcctcctaccgcaggatgttcggtggctccggcacatcgagccggcccagctccaaccggagctatgtgaccacatccacccgcacctacagcctaggcagcgcgctgcgccccagcactagccgcagcctctattcctcgtccccgggtggcgcctatgtgacccggtcctccgccgtgcgcctgcggagcagcatgcccggcgtgcggctgctgcaggactccgtggacttctcgctggccgacgccatcaacaccgagttcaagaacacccgcaccaacgagaaggtggaattgcaggagctgaatgaccgcttcgccaactacatcgacaaggtgcgcttcctcgagcagcagaacaaaatcctgctggccgagctcgagcagcttaagggccagggcaagtcgcgcctgggcgacctctacgaggaggagatgagggagttgcgccggcaggtggatcagctcaccaatgacaaggcccgtgtcgaggtggagagggacaacctggccgaggacatcatgcggctgcgagaaaaattgcaggaggagatgctccagagggaggaagccgagagcaccctgcagtcattcagacaggatgttgacaatgcttctctggcacgtcttgaccttgaacgtaaagtggaatccttgcaggaagaaattgcctttttgaagaagctgcacgatgaagagatccaggagctgcaggcccagattcaggaacagcatgtccagatcgatgtggacgtttccaagcctgacctcaccgctgccctgcgtgatgtccgccagcagtatgaaagtgtggctgccaagaacctccaggaggccgaggaatggtacaagtccaagtttgctgacctctctgaggctgccaaccggaacaacgatgccctgcgccaggcaaagcaggagtcaaacgaataccggagacaggtgcagtcactcacctgcgaagtggatgcccttaaaggcactaatgagtccctggagcgccagatgcgtgaaatggaagagaattttgcccttgaagctgctaactaccaggacactattggccgcctgcaggatgagatccagaacatgaaggaagagatggctcgccaccttcgtgaataccaggacctgctcaatgtaaagatggctcttgacattgagatcgccacctacaggaagctgctggaaggggaggagagcaggatttctctgcctcttccaaacttttcttccctgaacctgagagaaactaacctggagtcacttcctctggttgacacccactccaaaagaacactcctgattaagacggttgaaaccagagacggacaggtgatcaatgagacttctcagcaccacgatgaccttgaataaaaactgcacaggctcagtgcaacggcgcagtaccagcaagaaggaaaaaaaaatcgtatcttagaaaaaagagctttcaagtgcctttactgcagttttcaggagcgcaagatagatctgggatagaaacgagctcagcacataacaactgacacccccaaaaggcgtagaaaaggtttacaaaataatctagttttacgaagaaatcttgtgctagaatactttttaaagtatttttgaataccattaaaactgctttctttttccagaaaatatctgaccaacttgttactgcttcaataaaacttcagaaat

SEQ ID NO: 1569 - DNA, 1543 bp, Rattus norvegicus
cgaaattgcagtttctccttggcccacccctgtgtcagcagctccaggatgtggcagttcagaatcttcctgctgttcgcgtccacctgggggatttctggcgtatcagcccatcccgacccagtgttctccagcagcgagggtgcccaccaggtgcttcgggtcagacgagccaacagcttcctggaggaggtgcgggcaggcagcctggagcgggagtgtatggaggagatctgtgacttcgaggaggcccaggagattttccagaatgtggaagacacactggccttttggatcaagtacttcgatggtgaccagtgctcaactccgcccttggaccaccaatgcgacagcccatgctgcggccatggcacatgcatcgacggcctgggcggcttcagctgcagctgcgataagggctgggagggcaggttctgtcagcaggagatgggcttccaggactgtcgggtgaaaaatggcggctgctaccactactgcctggaggagaccagagggcggcgctgccgttgcgccccgggctatgagctggcagatgaccacatgcactgcaggcccaccgtgaattttccgtgtgggaaactgtggaagcggactgacaagaaacgcaagaacttcaaacgggacatagacccagaagacgaagaactagaactaggtccaaggatagtcaatggaacactaacaaagcagggtgacagtccctggcaggcgatccttctggactccaagaagaagctagcctgtggaggggtgctcatccacacctcctgggtgctgacggcagcccactgtctggagagcagcaagaagcttaccgtgaggcttggtgagtatgatctgagacgcagggacccctgggagttggacctggacatcaaggaggtcctcgtccaccctaactacacccggagcaacagcgacaacgacatcgccctgctccgcctgtcccagccagccacactctctaaaaccatagtgcccatctgtctgccgaacagcggcctggcgcaggagctcagtcaggctggccaggagacggtggtgacaggctggggctatcaaagcgacaaagtcaaggatggcagaaggaaccgcacctttattctcaccttcatccgcatccctttggccgctcgaaatgactgcatgcaggtcatgaacaacgtggtctcggagaacatgctctgcgccggcatcattggagacacgagagacgcctgcgacggcgacagtgggggacctatggtggtcttctttcggggtacctggtttctggtgggcctggtgagctggggtgagggctgtgggcacctcaacaactatggcgtctacaccaaagtgggtagctacctcaaatggatccacagctacataggggaaagggatgtttccctgaagagcccgaagctgtagcatccctccctgctcatctctggggcccagaggtcactcttagaataaggctgggctagtgagtaccaagacaggggacattaaaggggcaagcaacacctgaaaaaaa

SEQ ID NO: 1570 - DNA, 534 bp, Rattus norvegicus
ccttttttcgccaagatggcgccgaaagcgaagaaggaagctcctgcccctcccaaagccgaagccaaagcgaaggccttgaaagctaagaaggcagtgctgaaaggtgtccacagtcacaaaaagaagaagatccgaacgtcacccactttccggcggcccaagaccctgcggctccggaggcagccaaaatatcctcgaaagagtgcacccaggagaaacaagcttgaccactatgctatcatcaaattcccactgaccaccgagtcagctatgaagaaaatagaggacaacaacacgcttgtgttcattgtggatgttaaggccaacaagcaccagatcaaacaggccgtgaaaaaactctatgatatagatgtggccaaagtcaatactctgatacggcctgacggagagaagaaggcatatgttcgcttggctcctgattatgatgctctagatgttgccaacaagattgggatcatctaaagtgagtccagatggttaattctaaatatatactttttttccaccata

SEQ ID NO: 1571 - DNA, 688 bp, Rattus norvegicus
ggcgcagcgggcctagcctagtcaacatgccggtcgccagaagctgggtttgtcgcaaaacctatgtgaccccacggagacccttcgagaaatcgcgtctcgaccaggagctaaagttgattggagagtatggactccggaacaaacgtgaggtgtggagggtcaaatttaccctggcgaagattcgtaaggctgcccgggagctgttgacgctggacgagaaggatcctcggcgtctgtttgaaggcaacgctctgctgagacgacttgttcgaattggggtgctggatgagggcaagatgaagctggattacattctgggcctgaagattgaggatttcttggagagaaggctgcagacccaggtctttaagctgggcctggccaaatctattcaccatgcccgtgtgctcatccgccaacgtcacatcagggtcctcaagcaggtggtgaacatcccatctttcattgttcgcctggactctcagaagcacattgacttttccctcctttctccttatggtggtggccgcccaggacgagtgaagaggaagaatgccaagaaaggccagggtggtgctggagctggtgatgatgaggaagaggattaattaattaattaataccttgttgcactggaggattgtctagttttcccgttgacaaataaaacagaattgatacttga

SEQ ID NO: 1572 - DNA, 3091 bp, Rattus norvegicus
gccaacccagatcccgaggtgcgccacgcccagcccagatctccacgcctgccaggagcgagcttcgccggctcgctgtcccccgagcagcctctgtccttctgtccgagtcccgcgcccttctcgggacccctgcccagcggcagcactgccaccctgccggccatggagaccccgtctcagcggcggcccacccgcagtggggcgcaggccagctctacccctggtcgcccactcggatcacacggctgcaggagaaggaggacctgcaggagctcaatgaccgtctggccgtgtacatcgatcgcgtgcgctccctggagacggagaacgcggggctgcgccttcgcatcactgagtctgaagaggtggtcagccgagaggtgtccggcatcaaggcggcctacgagcgagctgggggatgcccgcaagaccctcgactctgtggccaaggagcgcgcccgcctccagttggagctgagcaaagtgcgtgaggagttcaaggagctgaaggcgcgcaataccaagaaggagggggatttgttggctgcgcaggcccggctcaaggacctggaggctcttctcaactccaaggaggctgccctgagcactgctctcagtgagaaacgcacgttggaaggcgagctccatgatctgcgggggcaggtagccaagcttgaggcagccctgggtgaggctaagaagcaactccaggatgagatgctgaggcgagtggatgctgagaacaggctacagaccctgaaggaggagctggatttccagaagaacatttacagtgaggaactgcgtgagaccaagcgccggcacgagacccggctggtggagattgataatgggaagcagcgagagtttgagagccggctggcagatgctctgcaggagctgcgggcccagcatgaggaccaggtggagcagtacaagaaggagctagaaaagacatactctgccaagctggataatgcccggcagtctgccgagaggaacagcaacctcgtgggagctgcccatgaggagctccagcagtctcgaatccgcattgacagcctctcagcccagctcagccagctccagaagcagttggcagccaaggaggccaagctgcgtgacctggaggactccctggcccgtgagcgggataccagccggcgcctgctggctgaaaaagagcgggagatggctgagatgcgggcaaggatgcagcagcagctggatgagtaccaggaattgctggacatcaagctggccctggacatggagatccatgcctaccgaaagctgctggagggcgaggaggagaggctacgcctgtcccccagccctacctcgcagcgcagccgtggccgcgcctcctcccactcctcccagtctcagggtggaggcagcgtcaccaaaaagcgcaagctggagtcttctgagagccggagcagcttctcgcagcatgctcgcactagcggccgtgtggccgtagaggaagtagatgaagagggcaagttcgtgcggctgcgcaacaagtccaacgaggaccagtccatgggcaactggcagatcaggcgtcagaatggtgatgatcctttgatgacttatcgcttcccaccgaagttcaccctaaaggccgggcaggtggtgacgatctgggcttcaggagctggggccacccatagcccccctactgacttggtgtggaaggcacagaacacttggggctgtgggagcagccttcgcacggctctcatcaacgccactggagaagaagtggccatgcgcaagctggtgcgctcactgaccatggttgaggacaatgacgatgaggaagaggatggagatgagctgctccatcaccaccgtggctcccactgcagcagctcgggggaccccgctgagtacaacctgccgtcagcaccgtgctgtgcgggacatgtgggcagcctgctgacaaggctgccagtggctcaggaccgcaggtgggcggatccatctcctctggctcttctgcctccagtgtcacagtcactcgaagcttccgcagtgtggggggcagtgggggtggcagcttcggggacaacctagtcacccgctcctacctcctgggcaactccagtccccggacccagagctcccagaactgcagcatcatgtaatctgggacctgccaggcgagggtgggggcagaggccacctgctccctcttcaccacatgccacctcctgccctgttccttatgagagcaggtctgaagccaaagaaaactatcccctgcctttgggtgtttttcttttttccttctattttttttctaagagaagttattttctacagtggttttatactgaaggaaaaacacaagcaaaaaaaaaaaagtgtctttatctcaatccttagtccttcccttttccctgtatctgccttaaaccaaagggcttctcataggagcccagggaaaggactgcttttgtagtctagatttttgtcctgctgccttgcgtttgccctcatcccaggaccctgtgacacggtgcctgagaggcaggcatggagttctctttaccggcctcctccacagctggcccactgccatgccagctgcaaagaaaaggggtgcagagagaatgactgaaaggtcaagcccctcctggctcactacacttggccgagactcctctgcctgccttaccctcctgccttcccgagcctgggacgagtggattcccagaggcaaatctgccatgcttgcttttttctatattgtattcagacaagagatgggaaagatggggaaggagaagggacggtcagtttgaacctacctttcccccgtgcgtacagcctgctggtgggctctgtctgtcggtggagggcagtattaagtgggattggggagagagtgagggaaaggctcctggagattgggagaacctgctggggccagtgagaagactagagggtgtggtgattggtggctacagcaaacactaaggaacccttcattcccacttcccatctgcacctctgctctccccccaaatcaatacactagttgtttccatcccgaaaaaaaaaaaaaaaaaaaaaa

SEQ ID NO: 1573 - DNA, 1244 bp, Rattus norvegicus
ggggaggcagctcagaggctctttctcaggcctctagctgggtctgtcctgtacttcaccagaggaaaaacgttcttgggagagcttgtcaggtgtggaacctcagccatggtggccttcttgttctgcaacctgctactggtggcctgtggctctgtcacctggaccatgtcagataccggagagtccggtgtcgacttagcagaccggcttgacctggttgagaagataggcgacacgcactccaaagacctggagatctggatggagctaggaaaacaacgggaggcggatgccagggagatgcacgcagtctgcagggtacagccctcagccatgctgcctcccgatcagccacagatcacaggcttggtcctcttccggcagctggggcccagctccagacttgaggcctccttcaatctggagggcttcccagccgagcagaacacctccaaccacgccatccacgtgcatgagttcggggacctgagccagggctgcgagtccaccggaccacactacaacccgctgggtgtgccgcacccacagcacccgggggacttcggcaacttcgtggtgcgcgatggccgcctttggaagcatcgaatgggcctggccacgtcactggccggaccgcactcgatcttgggccgcgctgtggtggtccacgctggcgaggacgacctgggtaaaggtggcaaccaggccagcgtgcagaacggcaacgcaggtcgccggctcgcctgctgcgtggtaggcaccagcaactcggaggcctgggagagccagacaaaggagcgcaagaagtggcggtgggagagcgagtgcaagaccacttaagcatcacccagggccgcctagcctagctgctgtgtgcatagatgcctccacacgcgcctctagacgcctccagtcatcctagaggtctctgggtgtcctagactgacgcttcccagacacctcaatcgcctctgtgcgccccacactcttccacataccccagacacctctgtatggctcagatgccttcaagaacctcctcggccacgtccacgagccccagatgttcccacgtgccctgggcactgttctcggagaccaggacactttttgtaacctaggaatcctttcacaccctatgcacttccacagacccaaactccttcgtgctctaggtccacctcgaactactttatgccccaagacaatcccataagcccctagcatccccacacttccgc

SEQ ID NO: 1574 - DNA, 129 bp, Rattus norvegicus
ttgctcagcgccacaggtaggcgcggggtggggaagcagggaatgcacaaggcggcaagggttggaaggacgggagagagaaaaggtggaaaacacaggatgtaatccctctcttctctacctccccca

SEQ ID NO: 1575 - DNA, 852 bp, Rattus norvegicus
aattcggcacgagcgcgatggcacctgccgcgtcaaggctgagggtggaatccgagctccggtcgcttcccaagcgagcgctcgcccaatacttgctgtttctaaagttctatccggtggtcaccaaagctgtcagcagtggcattttgtcagcccttggaaaccttctggcccagatgattgagaagaagcagaaaaaagactctcgaagtctagaagtcagtgggcttctcagatatttagtttatgggttgtttgtcacaggtcccctgagtcactacctctacctcttcatggagtactgggtccctcctgaggttccctgggccagagtcaagaggctcctgctggatcgcctgttctttgccccaacctttctgctgctgttcttcttcgtcatgaacttgctggagggaaaaaacatcagtgtctttgttgccaagatgaggagtggcttctggcctgctctgcaaatgaactggaggatgtggacacccttacagttcatcaacatcaactatgtgcccttgcagttccgggtgctctttgccaacatggcagctctgttctggtatgcctacctggcctctctggggaagtgatgtctgatacaccgtggatgaggtgtggggagatccaaccaccagcaggagagagcagaatccatcattaaggacacctcatgactaaattatgtgattcaagatgccttaaaattacagagggaggaacgtgtcagtgtcggaatcatgtgcttcaaagagacagcactagtctcggtggagttaatcttagttgtcactgcaaacaggtaaaggtcaataaacagtgatgcagcctcgtgccgaattc

SEQ ID NO: 1576 - DNA, 3081 bp, Rattus norvegicus
tcagcctgggatgcgggcacggtcccggacagccccattctgccttcacgctaatgatgctggaccacaccagagcccctgagctcaacattgacctagaccttcacgcctccaactcgcctaaggggtccatgaagggcaaccaattcaaggagcaagacccttgtcctcctcagcccatgcaaggactggggaagggggacaaacgtgaagagcagggcctgggcccggaaccctcagcaccccggcagcccaccgaggaggaggaggcactgattgaattccaccgctcctaccgggagctcttccagttcttctgcaacaacaccaccatccacggggccatccgcctggtgtgctccaaacacaaccgcatgaagacggccttctgggcggtgctgtggctgtgcaccttcggcatgatgtactggcagttcgccttgctgttcgaggagtacctcagctacccagtgagcctcaacatcaacctcaattcagacaagctggtcttccctgccgtcactgtctgcacccttaatccttacagatacactgaaattaaagaggagctggaagagctggaccgcatcacggagcagacgctttttgacttgtacaaatacaactcttcctacactcgccaggctggggcccgacgccgcagctcccgcgacctcctgggtgctttcccgcaccccctgcagcgcctgcgcactccacctccgccctactccggccgcacggcgcgcagcgggtcttccagcgtacgcgacaacaatccccaagtggaccggaaggactggaagatcggcttccaactgtgcaaccagaacaaatcagactgtttctaccagacatactcctctggggtggatgcagtgagggagtggtaccgcttccattacatcaacattctgtccagactgtcggacacctcgcccgctctagaggaagaagccctgggcaacttcatcttcacctgtcgcttcaaccaggccccctgcaaccaggcgaattattccaagttccaccaccccatgtacgggaactgctacactttcaatgacaagaacaactccaatctctggatgtcctccatgcctggagtcaacaatggtttgtccctgacactgcgcacagagcagaatgacttcatccccctgctgtccacagtgacgggggccagggtgatggtgcatggtcaggatgagcctgcctttatggatgatggtggcttcaacttgaggcctggcgtggagacctccatcagtatgagaaaggaagccctggacagcctcggaggaaattacggcgactgtactgagaatggtagcgatgtcccggtcaagaacctttacccttccaagtatacacagcaggtgtgcattcactcctgcttccaggagaacatgatcaagaagtgtggctgtgcctacatcttctaccctaagcccaagggagttgagttctgtgactaccgaaagcagagctcctggggctattgctattataaactgcagggcgccttctccttggacagcctgggctgtttctccaagtgtcggaagccttgtagtgtgatcaactacaaactctctgccggctactcacggtggccatctgtgaagtcccaggattggatcttcgagatgctgtccttgcagaacaattacactattaacaacaaaagaaacggagttgcaaagctcaacatcttcttcaaggagctgaactataaaactaattcggagtctccttctgtcacgatggtcagcctcctgtccaacctgggcagccagtggagcctgtggtttggctcgtccgtgctctctgtggtggagatggcggagctcatcttcgacctcctggtcatcacacttctcatgctgctacgccggttccggagccggtactggtctccaggacgaggggccaggggtgccagggaggtggcctccactccagcttcctccttcccgtcccgtttctgtcctcaccctacatccccaccaccttctttgccccagcagggcatgacccctcccctggccctgacagcccctccacctgcctatgctactctaggccccagtgcccctccactggactctgcggcgcctgactgttctgcctgtgccctggcggcgctctgagagaggagaaggatcctctcacccagccctgagctcccttgtaaactgatggatatctcacttcagcacatcttccccagcggccccgccgagccctctgtggtgtgcctgcctgagggaacaggctgagtaaggggcccaggaagccgtccagaggacaggggctaacgatctgctcagagctgccctgcccctgcttctgaacactgccttccacacaagcacagacaagttccctcttccctcggatcagcccagccagacttggagctctgacaaggaactttcctgggagaggaccaaggaacaaatagaacagccatcgcactcctacccccgtgaccagaggctggcctggcctcactgccttcagggacactgatgtctgctcctctccttgaacttgggtggggaaccccacccaaaagcccccttgttagttctttggcaattcccctcccctcactcctcagggtggggactagagtaagacagaccagggtaggcctggtgttctctctcattctcaagactctctcatttgatacaccataccccagtgcctctgtggtgttgtctccttctttctgtttcctcagcctggaagcttctttcactgtccctcagaacacacagtctatgcatcccttagaaacctgcccaaaggcaccatttcttttgtgaactcagttaccctgttatgtctcccccagaattgtcgccctctcccctcacccccacagtgtactgtattatatgttcacattcttttgtgtctgcctccctgggtaaactgagctccttgtgtggtcagggatgagatttgctctgttttgtatccttccggtctagcccagtctcccacttgggacgggtaggcaggtactcaataaaggcttgttccatcaaaaaaaaaaaaaaaaaaaaa

SEQ ID NO: 1577 - DNA, 1136 bp, Rattus norvegicus
gggcttcttggacgtttttgggaggggacagcaagggaaggtccttctgcctctagggacccagacttccgctttctgcagacagcagcaggctctgggctctgggaatccactgctgtctggcctagaagcatcatagaacacgaggattccatacacaggaggcccctgaagctgagctgagctgatgaagacacagtggagtgagatcttgacacccctgttgctgctgctcctgggtttgctccatgtctcctgggcccaaagcagctgtactgggtcccctggcatccctggggtccctggcatccctggggtccctggctctgatggcaaaccaggcactccagggataaaaggagagaaagggctccccggactggctggagaccatggtgagttaggagagaaaggggatgcagggatccctgggatcccaggcaaagttggccccaagggtcccgtcggccctaagggtgctccaggcccccctggaccccgcggtcccaaaggtggctctggagactacaaggctacccagaaagtagccttctctgccctgaggacggtcaacagcgccctgcgaccaaaccaggccattcgcttcgaaaaggtgatcaccaatgttaatgataactacgagccgcgcagtggcaagttcacctgcaaggtacctggcctctactacttcacctaccacgccagttcccgcgggaatctgtgtgtgaacatcgtgcgcggccgcgaccgagaccgcatgcagaaagttctcaccttctgcgactatgcccaaaacaccttccaggtcaccacgggtggggtagtcttgaagctggagcaggaagaggttgttcacctgcaggccacagacaagaactccctgctgggcgtcgagggagccaatagcatcttcactggctttctgcttttccctgacatggatgtatgatcacggggtcaaatcactcctatccaaaacctcctccctgccagtaatcctccctggaccccagacactgccctttgactgcccaaagccctgaccagagccctgtagatgttacagaatgggtaaataaactcttcaaggccaagaaaaaaaaaaaaaaaaaaaaaaaaaaaaaaaaaaaaaaccc

SEQ ID NO: 1578 - DNA, 402 bp, Rattus norvegicus
tctgccgctcagacgatcacgcggttagtggatccttgttcacgcctcttcctgcagttctaggccacgagggagctggcattgttgagagcattggagaaggggtgacttgtgtgaaaccaggtgataaagtcatcccgctgttctctccccagtgtggaaaatgcaggatctgcaagcacccggaaagcaacctctgttgccaaactaagaatctgacacagcctaagggagctttgctggacggcaccagcaggttctcctgcaggggaaagcccattcaccacttcatcagcaccagcaccttctcccagtacactgtggtagatgacatagcggtggccaaaatcgatacggctgcaccgctggacaaagtctgcctcatcggctgtggcttctcga

SEQ ID NO: 1579 - DNA, 2277 bp, Rattus norvegicus
ccaccagcgacagaatttactattggaagcagtttgagaaagctcaggtgttggccatggtcttctccagcagagtcttttttttttcacgtgtccccttactccagacccttggcggtttgacgagcagaaacaccagctccccgccggatccagccgacacctcaaagcaagagagcgacatggcagctcctgctaagggcgagaacctgtccctggtggtgcacggacctggagacattcgcctggagaactacccaatccctgagctgggcccaaatgatgtgttactaaagatgcattcggtggggatctgtggctcggatgttcactactgggagcatggccgaattggggacttcgttgtgaaaaagccaatggtgcttgggcatgaagctgctggaacagtcacaaaagtgggaccgatggtgaaacatctaaaaccaggagatcgggtggccatcgagcctggcgttccccgagaaatagatgaattctgcaagatcggccgatacaatctgacgccatccatcttcttctgtgccacgcccccagatgatgggaacctctgccgcttctacaagcacagcgctgacttctgctacaagcttcctgatagtgtcacctttgaagaaggggccctgattgagcctctctctgtggggatctatgcctgccgtcgaggttcggtttccctggggaacaaggtccttgtgtgtggagctgggccaattgggatagtcactttgcttgtggccaaagcaatgggagcttctcaagtagtggtgattgacctctctgcttctcggttagccaaggccaaggaagttggagcagactttaccatccaggttgccaaagagacccctcacgacattgccaagaaggtggaaagtgtgctggggagcaagccagaggtcaccatcgaatgcacgggagcggagtcctctgtccagacgggcatctatgccactcactctggcgggaccttggtggttgtgggaatgggccccgagatgatcaatttacccctagtgcacgcagctgtgcgggaggtggacatcaaaggcgtgtttcgatactgcaacacgtggccgatggcagtttccatgcttgcatcgaagactttgaatgtaaagcccttagtgacccataggttccccctggagaaggctgtagaagcctttgaaacagccaaaaagggactggggctgaaagttatgatcaagtgtgaccccaatgaccagaacccctaaatgtgattgctctatgcccttagcccactctctcagcatctaagggctaaatggaccagaaggggaagccattaatgcagaaccttctttttgaatggtaggaataataaactcataagccgagagccttagaggagctggcgtgccttaaagacagaagtaggggcaccttgggggacctcgtagccagaatgagatgcgtatactgagtaaagtctagaaccaagagtctggcagagaggtcccggaaatgccctttctcagtaccttctttgggtgaggagacgaagcatccttcgtccatgttccaatgtgggtgccagagagtggggctaacatggagaaatgacgtcattaacatgggagtggccccagagctgttcagagcacagtgtttcccaagtgtcatttgatttgaggggaataagggcactcagctctgcctcagctcagaattctgtccttacatttgcaaagtggaggccttcttcccaacagtgctcattcatgttcaggagcagtatcgttgctaagcaaccaggagtcttccacccaaagatcctaaatccagcctaactcatacaagagggccacaggagggcttgagtttcccactcacaggattcgcctcctctcccaggctcactcctaggcaattattatcccatcccactcagaagatgctccccttctcggctgttaaggctagtgatatctgatggatgggtatcacagagcctaattaaattatggggcttttctttataagatctgggtccaaatcatgccctttgtgatcttaagataatcaagaagagcacagtaactgtggtgtaacttgggctgcagtctgtaatccacctcttcagctatgagtaggggacacgtgaaaaaaaaaagactctgctggagaagaccatggccaacacctgagctttctcaaactgcttccaatagtaaattctgtcgctggtgttgaaaaaaaaaaaaaaaaaaaaaaaaaaaaaaaaaaaaaaaaaag

SEQ ID NO: 1580 - DNA, 1075 bp, Rattus norvegicus
gtttaactgcactcgggactcggcgcgcgcgtgtgtctgttctctccatcgtcatggccgccgacatcagccagtgggccgggccgctgtcattacaggaggtggatgagccgccccagcacgccctgagggtcgactacggcggagtaacggtggacgagctgggcaaagtgctgacgcccacccaggtcatgaatagaccaagcagcatttcatgggatggccttgatcctgggaagctctacaccctggtcctcacagaccccgatgctcccagcaggaaggaccccaaattcagggagtggcaccacttcctggtggtcaacatgaagggcaacgacattagcagtggcactgtcctctccgaatacgtgggctccggacctcccaaagacacaggtctgcaccgctacgtctggctggtgtatgagcaggagcagcctctgaactgtgacgagcccatcctcagcaacaagtctggagacaaccgcggcaagttcaaggtggagtccttccgcaagaagtaccacctgggagccccggtggccggcacgtgcttccaggcagagtgggatgactctgtgcccaagctgcatgatcagctggctgggaagtaggggcgctgcagagcccgcagccccggggaccccacagtacagtcaagtcgtataaagcatgtctgtggggtgtccccccacgcccatccttccttcccaccctctcatagggagttctcagttgtgctaggttacagctctaggatgtcttccactttgtccaggaccaggcccagtaacatcttttggggtgggcttatcaatcctcccatctcggctgagccctgaccgcccaggtcagatggctgcatagttatcaatattcctgggctgctgctacgcagtgctgctgtgtggaggccaggctgtggagagagaccctgttagccccttacatcccagtgggataagcaaaagtcaccggagttgctgggcgtgttaaacctcatcaaatacaaataaagggcattgcattcagaaaaaaaaaaaaaaaaaaaaaaaaaaaaaaaaaaaaaaaa

SEQ ID NO: 1581 - DNA, 896 bp, Rattus norvegicus
gaatatatttgatcggaagatcaactttgatgccctcttaaaattttcccacataactccctccacacagcagcacctaaagaaggtctatgccagttttgcactgtgcatgtttgtggcagcagcaggggcctatgtccatgtggtcacacgtttcatccaggctggcctgctctctgccctgggcgccctggccttgatgatttgcctgatggccacacctcacagccatgagacggagcagaagaggctgggactgctcgccgtcgccttccttacaggagttggcctgggacctgccctggagctgtgcattgccatcaaccccagcatcctccccacggccttcatgggcacggccatgatcttcacctgcttcagcctgagtgccctctacgccaggcgccggagttacctctttttgggaggtatcttgatgtcagccatgagcctcatgttcgtgtcctctctggggaaccttttctttggatccatttggctgttccaggcaaacctgtacatggggctgctggtcatgtgcggctttgtcctcttcgacactcagctcattattgaaaaggctgaacacggagacaaggattacatctggcactgcattgacctcttcttggacttcgttacactcttcaggaagctcatgctgatcttggccttcaatgagaaggacaaaaagaaagagaagaagtgacgtggtgatcgatcggcctctcccagctcgccttctctccctcagccccgtttctttgcacacatcacaggtgtcgtgtcccatgaaatgaaaagcatcaggaaagcttttgtactttgtggttttctctattttgaattttttgatcaaaaaactgattagtgaatatagtttggagtttggcttc

SEQ ID NO: 1582 - DNA, 3551 bp, Rattus norvegicus
gtgtcctctgtctctgtctctgtctctgtctctgtctctgtctctgtctctgtctctgtctctgtctctgtctctctctctctctctctctgtgtgtgtgtgtgtgtgtgtgtgtgtgtgccttagagtctcttagactggctggcctgagagtcacagggaactacctagctacacttctcagtactgggatgagaggtgtgcattagaatgcctgcgttttacacgagctctggagactaaactcaaatcttcctacttgccaggcaagcagttaatgtcattatactgcatttccattttgatgtgttagctagtcatttctcttttaacatttggagtattttataactttggaggtagggctattcttaccctgtgaactgcttttcctctctctctctctctctctctctctctctctctctctctctctctctctctctctctcaagtcaagagattcccccctccgcatcattttcccctagttaataattaccaagaaatttgcaccaagaccaaaaaaagcctatgtatttcagaaatagattaactaggttactttttaacaaagcttaggtcaaagaatactataaaacgttggttttgccccagtcgcattactctcttgaatgtggcctcttttttaaatttaaacatgagacacttaaaacttacaggttttatttttttcctgttgtctttgactgaatccctagccctacccacaaagcctcaggatgtaggtaagaaatttacttgtgtattaccagggacaactaagtgaaggaaattactttcctttagccttttaaaactttgattattccggtggttttatttttctctctcttctcttagtatatgtatactggtcagtagtttcaaaggacccactacagattttcatattatctattctgtaggatgcttgcctttagaaacggccaacaatctggatcatgttgacttgagatgtaatttggacttcaaaaatattagaattttgtgacagatatagatatataaatatatgtatagtccaacagaagagcatagatacagtatatacatattcatacatatacatacatacacacatatgtacacactcacacacaaacacatgtataaacatttatatacaatctttaaaaaatattttttaaatatttttggttgtccaatatgtcttccagctagatgataaataccgtcaggtatatgagatcctgctttctccttcagctggcgttacacacctgcaacatactacgccaagagcaaggcgtgtcaaccgggtggaaaaggcaatttttacattttaccaaatgaggaaactttgaaattttctttgaaagaaaagaaaattttctttgaaaggtctttttaaatacctctggccagaaaggcacattttttttttacaggaatgtagtttccttaatatcatcccagagaacatatactcaagtgatattatacagactgataaggttgtatctatgtatcagagaatgtaaaaatttataatatatataacatcaatcaatcaattaatgaaaaagaggccatgcatttgaaagagagcaaggaggggttaacaggagaacaggcaggggatcatttcaatgctactcagaaattcataaatgagaacgttgcatacctgaccatcattgcatctgcccagtatgttcaggaagcatcctttgaggaggtggaaatgctggtgaaggtcatgctggattacaaggataggtgcttggctgacagcacacttccggagtgttcaaagatagctaatgatgctatccaggacatgctctgtgatatgaaggggctgccacagaagcataacttctcccattgctgtaggcaagccggctttcaaagaagactctgcttcttctacaacaagaaagctaatgtaggatttctgccccctttccctactctggatccagaagagaaatgccaagcttataaaaataacagtgaatcttttctcaacctctatatgtatgaggtggccagaaggaacccctttgccttcgccccagttcttctgaacgttgccgctaggtttgaggaggcggcgaccacgtgctgtgaacagcaacagaaagccacctactttcaagacaaggcagcccccatcacacagtatttaaaagcgttatcttcttatcaaagaaatgtttgtggagcccttttaaaatttggacccaagaccttaaactctataaacatcgccgtgtttagtaagaagttccccaagattggatttgaagaccttacgtccctcttagaagatgtttcttccatgtatgacgggtgctgtgaaggggacgtcgtgcagtgcatccggagccagagccaggttatgcaccatatttgttcaaaacaagactccatctcaagtaagatcaaagcgtgctgtgagaagaaactgccagagcgcgcagactgcataatcaacgcaaacaaggatgacagaccagaagacttatctctgagaacacccaaatttaccgacagtgaaaatgtgtgccaagagcgagattccgagcaggacaagttctttgctgagtttctttatgattactccagaagacatactgaactgtctacaccagagctcctaagaattactaaagtgtataaggatctcctggaagattgctgcaacagaaaaaacccgttaagctgttaccgccatgcggaggataagttcaacgagacaacagagcgaagccttgcgatggtccagcaagagtgcaaacagttccaggaattggggaaggacgctctacaacgccatttccttgtcaagttcaccaaggcagcccctcaactccccatggaagaactggtctcccttagtaaggaaatggtggcggctttggcaacctgctgcactctcagtgacgagttcgcctgtgtggacaacttggcagatttagttcttggagaattatgtggaatgaataagaatcgaactatcaatcccactgtggatcactgctgcagagctgactttgccttcaggagaccctgctttgagcacctgaaagccgacaccacctatgcactcccatcagtctctgcacttgtatctgctttgcgtgcagactggtgtcagcctctcaaggaggaccttcagaataagagacacaggtttctggtcaacttagtgaagtggatgccagagatcacagatgaggaacgtctgtgtttgttcacaaagttcacggctgctggggaggagtgtggcaacatacagaagcctgaggcctgtttcagtccagagagttcaaaaaccggtgatgtgagtcaagatgcagagaaacaaaggtgaacggaatgaccagagccagtaccagctcacaggatcgtcctgtggagaagttcagctcttaagaagactggaatagaaggtccttctgtaaccctttcttgaatcatgttcctacaaaaggcaataaaaagggaggataaagtttctcgcggcgcgaaaaaaaaaaaaaaaaaaaaaaaaaaaaaaaa

SEQ ID NO: 1583 - DNA, 1087 bp, Rattus norvegicus
ggaagagggaagaaggcgctgaggaccgcgcacgcccagcccagctgctgacttcaccacctcaccgagacccactccgctggccagcacgctacactgacaggatcctggctgcacccactgtgatctctttgaactaggatagcccgcgctcactgtttccctgaagatggaagaaatcccacccacccactacgctgcgtccagggctgcctcggtggcagagaactgtataaattatcagcaagggacccccaacaaggtattcaaggtgcagacggtccagcaggcaagcaaggaggatatcccaggaagaggccacaagtaccatctgaagttttctgtggaagaaattatccaaaaacaagttacagtgagctgcacggctgaagttctttaccctcgaatgggacaaggctctgcaccggaagtcaacttcacatttgaaggagaaatcggcaagaacccagatgaggaagacaacacgttttatcaaagactcatgtccatgaaggaaccactacaagcacaaaatattccagacaattttggaaatgtgtctccacaaatgaagccggtccaccacttagcctgggtcgcctgtggttatgtaatgtggcagaactcgactgaagacacatggtataaaatggcaaagattcaaacggtcaagcaagtgcaaagaaacgatgacttcattgagttagactacaccgtcctactccacgacgttgcatcgcaggagattatcccctggcaaatgcaagttctgtggcacccacaatacggcacaaaagtaaagcacaacagccgcctcccaaaggaagcaccagcagagtaaacaagaccccaactcggagacagccgtcaacatgccccttaaccatgagtatgactgtcctcactggcacctagctaacaggccaagtgaatcccacagtgtcgctctgtatgtcttggctacaggaccgagctgcatagattccacaataaagagtagactacatgaaagtgtctttccaatagtaatggtactatggctatccactaataaagtcaacttcagcctcacaaaaaaaaaaaaaaa

SEQ ID NO: 1584 - DNA, 2462 bp, Rattus norvegicus
gtcgacccacgcgtccgaccaccttagctgccatcactgcacattggagcagctttctaaacaggtgccaccatgccagtgaagaagtacctgctgaagtgcctgcacaggctgcagaagggcccaggctacacctacaaggagctgctagtgtggtactgcaacaacaccaacacacacggccccaaacgcatcatctgcgaggggcccaagaagaaggccatgtggttcctgctcacgctgctcttcgcctgcctggtgtgctggcagtggggcgtcttcatccagacctacctgagctgggaggtcagcgtctcgctctccatgggcttcaagaccatgaacttcccagcagtcaccgtctgcaattccagccccttccagtactccaaggtcaagcacttgctgaaggacttgtacaagctgatggaggctgtcctggacaagattctggctccgaagtccagccacaccaacaccaccagtaccctgaactttaccatctggaaccacacgcccctggtccttattgatgagcggaaccctgaccatccagtggtcctcaacttgtttggggacagccacaacagcagcaacccagccccaggaagcacctgtaatgcccaagggtgcaaagtggccatgaggctgtgcagtgccaatgggaccgtgtgtaccttccgaaacttcaccagtgccacccaggccgtgactgagtggtacatcctgcaggccaccaacatcttctcacaagtgctcccccaggacctggtggggatgggctatgctcctgatcgcataatcctagcctgtctgtttggaacggagccctgcagtcatcggaacttcacacctatcttctaccctgattatggcaactgctacatcttcaactggggcatgacagagaaggcacttccttctgccaaccctgggactgaatttggtctcaagttgatcctggacattggtcaggaggactatgtccccttccttgcgtccacagcaggggctaggctgatgctccacgagcagaggacataccccttcattagagaagagggcatctatgccatggcaggaactgagacttctattggggtgctgctggacaagctgcagggcaagggggagccatacagtccctgcaccatgaacggctccgacgttgccattcagaacctctacagtgactacaacacgacctattccatccaggcctgccttcattcctgtttccaagaccacatgatccataactgcagctgtggtcactacttgtaccctttgcctgctggggagaaatactgcaacaacagagacttcccagactgggcctactgctacctaagcctacagatgagtgtggtccagagagagacctgcctcagcatgtgcaaggagtcctgcaacgacacccagtataagatgaccatctccatggctgactggccatccgaggcctctgaggattggatcctacatgtcctgtctcaggagcgggaccagagctcaaatatcaccctgagcaggaagggtattgtcaagctcaatatctacttccaagagttcaactaccgtaccatcgaggaatcgccggccaacaatatcgtgtggctgctctctaacctgggtggccagtttggcttctggatggggggctcggtgctgtgcctcattgagtttggggagatcattatcgacttcatttggatcactgtcatcaagctagtggcctcctgtaaaggcctgcgcaggaggcggccacagcgaccctacactggcccgccgcccactgtggccgagctggtggaggcccacaccaactgtgtcttccagcctgacacaaccagctgcaggcccaatgccgaggtctaccctgaccaacagactctgcccattccgggcactccacctcccaactatgactccctgaggctgcagccgctggacaccatggagtctgacagcgaggtggaggccatctagatccgcatccccacccgggaactagtgaactcaaaactgaggagtcacaaccattgtcagtgcctcatttcattagcccttgtccaaagagccagggcacagagcccatgtccctctggtcagccccaggctgaggggttcatagggtcaagatgctggtaccagaatattgaacttgtatccttttctagctcttgcccaccctagcccagtctttgctctctgttgacctagcagacaggctccagagacccatagagtccctctcctggtgataggccacttctctgtcttgttacaacctcagtctcccagaatcagtgaccttgccctagttggcattggctgaaccctgttaatagacttgggggtgtgcagaccatagggagggagcatcaggtaagaaggcttgacaggggagcacatgctttgttagaaaataaagagagaaaacaccgaaaaaaaaaaaaaaa

SEQ ID NO: 1585 - DNA, 722 bp, Rattus norvegicus
tcctttccgctcggccgttctcctgtacaggaggcagccatggcgcccagccggaatggcatgatcctgaagccccacttccacaaggactggcagcagcgagtggacacgtggttcaaccagccggcccgcaagatccgcagacgcaaggcccggcaggcgaaagcgcgccgcatcgcccctcgccccgcgtccggtcccatcagccccatcgtgaggtgccctacagttagataccacaccaaggtccgggctggcaggggcttcagcctggaggagctcagggtggctggtatccacaagaaaatggcacgcaccatcggcatctccgtggacccaaggaggcgaaacaaatccacggagtcactgcaggccaacgtgcagcgcctgaaggagtaccgctccaagctcatacttttccccaggaagccttctgctccgaagaagggagacagttctgctgaagaacttaaattggccacgcagctaacaggacctgtgatgcccatccggaatgtgtacaaaaaggagaaggccagagccatcacggaagaggagaagaactttaaggctttcgccagccttcgcatggcccgagccaatgcccggctcttcggcatccgagcaaagagggcgaaagaagccgcagagcaagacgttgagaagaagaaataatgcgcggctggagagttgtaataaattttccataaagcaaaaaaaaa

SEQ ID NO: 1586 - DNA, 1052 bp, Rattus norvegicus; identical to SEQ ID NO: 1383

SEQ ID NO: 1587 - DNA, 5240 bp, Rattus norvegicus; identical to SEQ ID NO: 1339

SEQ ID NO: 1588 - DNA, 1941 bp, Rattus norvegicus
caggatccgtgtggtccccttgtcataggctggagatctcgctgtcccccaagcctgtagccttctatcatgtgcctctatgctctgatcctggtgtttcttgcagcattcacagcagggggacacccatcgtcactacccgtagtggacaccctgcaaggcaaagtcctcgggaagtacgtcagcttagaaggattcacacagcctgtggccgtcttcctgggagtcccctttgccaagccccctctcggatctctgaggtttgctccaccacagcctgcagagccctggagcttcgtaaagaacaccacctcctaccctcctatgtgctcccaagaccccgtggcagggcaaatagtcaatgaccttctaactaactgggaagagaacatttctctccagttttctgaagactgtctctacctaaatatttacacgcctgctgacttgacaaaacgtgatagactgccggtgatggtgtggatccatggaggtggactagtgttaggtggggcatccacctatgatggactagccctgtctactcatgaaaatgtggtggtagtggtcattcaataccgtctgggtatttggggattcttcagcacaggggatgaacacagccggggcaactggggtcacttggaccaggtggctgcactgcactgggtccaggacaacattgacaactttggaggggacccaggctctgtgaccatctttggagagtcagcaggaggtgaaagtgtctctgttcttgtgttgtctcccttggccaagaatctctttcacaaggccatttccgaaagtggcgtggccctcactgcaggcctggtcaagaagaacaccaggcccttggctgagaaaattgctgttgtatctggttgtaaaagcacaacttcagcttccatggttcactgccttcgccagaagacagaggaagagctcttggagaccacactaaaattgaatcttttttcgctggatttgcacggagactccaggcagagctatccgtttgttcccactgtgcttgatggagtggtgctgccaaagatgcctgaggagatcctggctgagaaggacttcaacactgtgccctacatcgtgggaatcaacaagcaagagtttggctggattctgccaacaatgatgaactatccaccctctgatatgaaattggacccgatgacagccacatcgctcttgaagaagtcttcttttcttcttaaccttcctgaagaagcaattccagtggccgttgagaagtatttaagacacacagatgacccagacagaaataaagaccaacttctggaattgattggggatgtgatcttcggtgtcccatcagtgattgtctcccgtggacatagagatgctggagcccgcacatacatgtacgagtttcaatatcgcccaagcttctcatcaaaaatgaaaccaagtacggtggtaggagatcatggagacgaaatctactctgtctttggtgctccaattttaagaggtggtacctcaaaagaggagatcaatctcagcaagatgatgatgaaattctgggcaaactttgctaggaatgggaatcccaatggacagggcctgccccattggccagagtatgaccaaaaggaaggttatcttcagattggagccaccactcaacaagcccagaagctaaaagaaaaagaagtggctttctggtctgagcttctggctatgaagccactgcatgcaggacacactgagctatgaacgggagctctgccagcctcatcctcagggcagctcacatggaagatggttttggccaaggctttgaggagacttcagaactgtgtggtgggagtgggcagaggccagggagaggatatttgcacatgtggactcaaactgaaaaataaattttgttttataaatcaaaaaaaaaaaaaaaaaaaa

SEQ ID NO: 1589 - DNA, 443 bp, Rattus norvegicus
caagatcatcgaagacctgagggctcagatctttgcgaattctgtggacaatgcccgcatcgtcttgcagatcgacaatgcccgtcttgccgctgatgactttagagtcaagtatgagacggaactggccatgcgccagtctgtggagagtgacattcatggactccgcaaggtggtggatgacaccaacatcacgaggttgcagctggagacagaaatcgaagcgctcaaggaggagctgctgttcatgaagaagaatcatgaggaggaagtccaaggcctggaagctcagattgccagttctgggttgactgtggaagtggatgctcccaaatctcaggacctcagcaagatcatggcggacatccgtgcccagtatgaacagctggctcagaagaaccgtgaggaactggacaagtactggtctcagcagattgaggaga

SEQ ID NO: 1590 - DNA, 1294 bp, Rattus norvegicus
ggaattcccggaaaccgttgggcccgagcgaaccgtaccgagcgcgggcatcgcagagcgcgagtgcggagctcggagcgcagcacgatgggaggggagcaggaggaggagcgcttcgacggcatgctgctggccatggcgcagcagcacgagggcggcgtgcaggagcttgtgaacaccttcttcagcttccttcgacgcaaaacagactttttcattggaggagaagaggggatggcagagaagctcatcacacagacttttaaccaccacaaccagctggcacagaaggccaggagagagaagcgagctcggcaggagacagagcgtcgggagaaggcagagcgggcagccaggctggccaaggaggccaaggcagagactcccgggccacagatcaaggaactgactgatgaggaggcagagagactgcagctggagattgaccagaaaaaggatgcagagaaccatgaggtgcagcttaagaacggcagtcttgactctccagggaagcaggatgctgaggaagaggaagacgaggaagacgagaaggacaaaggaaagctgaaacccaacctaggcaatggggctgacctgcccaactaccgctggacccagaccctgtcagagctggatctggcagtgcccttccgagtcagcttccggctgaagggaaaggatgtggtggtggacatccagcggcggcacctccgggtgggcctcaaaggacaggcaccagtgattgatggagagctctacaatgaagtaaaggtggaggagagctcgtggctcatcgaggatggcaaggtggtgacagtgcatctggagaagatcaataagatggagtggtggaaccgcttggttaccagtgaccccgaaatcaataccaagaagattaaccctgagaactccaagctctcagacctggacagtgagactcgcagcatggtggaaaaaatgatgtatgaccagaggcagaagtccatgggcttgcccacctctgatgagcagaagaaacaggaaatcctgaagaagttcatggatcagcacccagagatggatttctccaaggccaaattcaactagctcctgttcaccttcctgaactcttgcagttgagcccgtagccactcaacttcctttcctgagacccaggagccttagggctgggcaggcgtgggacttcccaggcatgtgagctccagggattcactggagaagggctgggtcttgggggtcttgtccttgctatttgtcctgttacacattaaaactatttactctgttccaaagg

SEQ ID NO: 1591 - DNA, 1647 bp, Rattus norvegicus
cctctcgcccccccttcaggagcggttgtgcgatcagatcgatctaagatggcgactgtggaaccggaaaccacccctaccactaatcccccacctgcggaagaggaaaaaacagagtctaatcaggaggttgctaatccagagcactatattaaacaccctctacagaacaggtgggcactctggttttttaaaaatgataaaagcaaaacttggcaagcaaaccttcggttgatctctaagtttgatactgttgaagacttttgggctctatacaaccatatccagttgtctagtaatttaatgcctggctgtgactactcactttttaaggatggtattgagcctatgtgggaagatgagaaaaacaaacggggaggacgatggctaattacattgaacaagcagcagagacgaagtgacctcgatcgcttttggctagagacactgctgtgccttattggagaatcttttgatgactacagtgatgacgtgtgtggagctgttgtcaatgttagagctaaaggtgataagatagcaatatggacgactgaatgtgaaaacagagatgcagtcacacacatagggagggtatacaaggaaaggttaggacttcctccgaagatagtgattggttatcagtcccacgcagacacagctacaaagagcggctccaccactaaaaataggtttgttgtttaagaagacaccttctgagtatcctcacaggagactgcgtcacgcaatcgagattgggagctgaaccaaagcctcatcaaagcagagtggactgcactgaagctgactccatccaagtgttgctaagatataagagaagtctcattcgcctttgtcttgtacttctgtgttcattctcctccccaccccaatttttgctagtgtgtccacatcccaatcaaagaattacagtatacgtcaccccagaacccacagatgtgttcctggcccgctctgtaacagccgggtagagttaccacgacacacacttgcctttccacagtattcgaaaaagaacgtgcatttctgtcaccttagcaggaaaagatctggttttgttccactccatgcaggagcggatttgctggtgtgagagtctaagtacagctttctagcaaccttctgttttctgtcacagcattgtccttgctgtcctcttgctgatggctgctagatgttaatttatttgcttccctccttgataacattagtgattctgatttcaggtttttcatttgtttggcttttgtttttttcctcatgtaacattggtgaaggatccaggactatgacagaaaggtggaataaacattacatttgtgcattctttggtaagtttttttgttttttgtaactacaaagctttgctacaaatttatgcatttcattcaaatcagtgatctatgctgtgtgatccctaaacataattgtggactataaaaatgtaacaccataattacattcctaactagaattagttgtctgcttttgtatctttatgctgtactttaacactttgtattacttaggttattttgctttggttacaatggctcaagtagaaaagcggtcccatccatattaagacagtgtacaaaactgtaaataaaatgtgtacagtgaattgtc

SEQ ID NO: 1592 - DNA, 2924 bp, Rattus norvegicus
atggctcagtggaaccagctccagcagctggacacgcgctacctggagcagcttcatcagctgtacagcgatagcttccccatggagctgcggcagttcctggcgccttggattgagagccaagattgggcatatgcagccagcaaagagtcacacgccactctggtgtttcataacctcttgggcgagatcgaccagcagtatagccgattcctgcaggagtccaatgtcctctatcagcacaacctgcgaagaatcaagcagttcctgcagagcaggtatcttgagaagccaatggaaattgcccggattgtggcccgatgcctgtgggaagagtctcgcctcctccagacggcagccacggcagcccagcaagggggccaggccaaccaccccacagctgccgtagtgacggagaagcagcagatgctggaacagcatcttcaggatgtccggaagcgtgtgcaggatctagaacagaaaatgaaagtggtggagaatctccaggatgactttgatttcaactataaaaccctcaagagtcaaggagacatgcaggatctgaatggaaacaaccagtctgtgaccagacagaagatgcagcagctggagcagatgctcacggccctggaccagatgcggaggagcatcgtgagcgagctggcagggctcttgtcagcaatggagtacgtgcagaagacactgaccgatgaagagctggctgactggaagaggcggcagcagatagcgtgcatcggaggccctcccaacatctgcctggaccgtctggaaaactggataacttcattagcagaatctcaacttcagacccgccaacaaattaagaaactggaggagctgcagcagaaagtgtcctacaagggggaccctattgtgcagcaccggccaatgctggaggagaggatcgtggatctgttcagaaacttaatgaagagtgccttcgtggtggagcggcagccctgtatgcccatgcacccggaccggcccttagtcatcaagactggtgtccagtttaccacaaaagtcaggttgctggtcaaatttcctgagttgaattatcagcttaaaattaaagtgtgcattgataaggactctggggatgtcgctgccctcagagggtctcggaaatttaacattctgggcacgaacacaaaggtgatgaacatggaggagtccaacaacggtagcctgtctgcagagttcaagcacctgaccctgagggagcagagatgtgggaatgggggccgtgccaattgtgatgcctccttgattgtcactgaggagctgcacctgatcacctttgagacagaggtgtaccaccaaggtctcaagatcgacctagagacccactccttgccagtcgtggtgatctccaacatctgtcagatgcctaatgcttgggcatcaatcctgtggtataacatgctgaccaataaccccaagaacgtgaacttcttcactaagcctccgattggaacctgggaccaagtggccgaggtgctgagctggcagttctcgtccaccaccaagcgagggctgagcatcgagcagctgaccaccctggccgagaagctcttagggcctggtgtgaactactcagggtgtcagatcacatgggctaagttttgcaaagaaaacatggccggcaagggcttctcgttctgggtctggctagacaatatcatcgaccttgtgaaaaagtatatcttggccctttggaatgaagggtacatcatgggtttcatcagcaaggagcgggagagggccatcctaagcacaaagcccccgggcaccttcctgctgcggttcagtgagagcagcaaggaaggaggggtcactttcacttgggtggaaaaggacatcagtggcaagacccagatccagtctgtagaaccatataccaagcagcagctgaacaacatgtcatttgctgaaatcatcatgggctataagatcatggacgctaccaacatcctggtatccccactggtctacctctaccctgacattcccaaggaggaggcattcggaaagtattgtcgccccgagagccaggagcaccctgaagctgacccaggtagtgctgccccttacctgaagaccaagttcatctgtgtgacaccaacgacctgcagcaataccattgacctgccgatgtccccccgcactttagattcattgatgcagtttggaaataacggtgaaggtgctgagccctcagcaggagggcagtttgagtcgctcacgtttgacatggatctgacctcggagtgtgctacctccccgatgtgaggagctgaaaggcaaagctacagagtatgactgagacactgcccatgtcaccttagcagcaactcagatcactgaactcactgtgtccagattttttctttaacctcctacttctgctgtctttgggcagtctgggtactttttaaaatagagaactgagtgagcgtgggtgatgcgctcttatgtgaggaggagggcacctcttgagtccgtgatggctgtgaaagcagagggctgggggggagcgaaaggaaacacctatgttctgtccgcctgtcctcctggtttgttgttgacaagcgcctcctggtgccatggcatcctgctgcccctttctgtgagctgataccccaggctgggactcccggctctgcactttcaacctggttaatgtccacatagaagctaggactaagcctataggcttctctttaagttaaaaaaaaaaaaaatactaagaattaaagggcaaaacacactgaaaacagcatagcctttccatatcaaagaaaactcgggtaacagccttttcggtgctttaagctgtcttaggctgatcatttatataaactctgcaatggttcaatcaatctgtaaagacagctgagaac

SEQ ID NO: 1593 - DNA, 710 bp, Rattus norvegicus
cttttccggttcccgcagccgcagccatgagcagcaaagtttcacgcgacaccctctacgaggcggtgcgggaagtcctgcacgggaaccagcgtaagcgccgcaagtttctggagacggtggagctgcagatcagcctgaagaactacgaccctcagaaggacaaacgcttctcgggcaccgtcaggcttaagtccacccctcgccccaagttctccgtgtgcgtcctgggggaccagcagcactgtgatgaagccaaggccgtggatatcccccacatggacatcgaggcgctcaagaagcttaacaagaacaagaagttggtcaaaaagctggccaagaagtatgatgcctttttggcctccgagtctctgatcaagcaaatcccacgtatcctgggcccaggcctaaacaaggcgggcaagttcccctccctgctgacacacaatgaaaacatggtggccaaagtggatgaggtgaaatccacaatcaagttccagatgaagaaggtgctgtgtctggccgttgccgtcggccacgtgaagatgaccgatgacgagctagtctacaacatccacctggctgtcaacttcttggtgtccttactcaagaaaaactggcagaacgtccgggctctgtacatcaagagcaccatgggcaagccccagcgtctgtattaggacgctccaataaacctcgttgctgccttc

SEQ ID NO: 1594 - DNA, 715 bp, Rattus norvegicus
tctcgctgagcccgccaacatggtgttcaggcgtttcgtggaggttggccgagtggcctacatctcctttgggccccatgctggaaagctggtcgcaatcgtagatgttattgatcaaaacagggctttagtggatggaccctgcacccgggtgaggagacaggccatgcctttcaaatgcatgcagctcactgacttcatcctcaagttcccacacagtgcgcgccagaagtatgtacggaaagcttgggagaaggcagacatcaatacaaagtgggccgccacacgatgggccaagaaaattgatgccagagaaaggaaagccaagatgacagattttgatcggttcaaagtcatgaaggcaaagaaaatgaggaacagaataatcaagactgaagtgaagaaactccagagagctgctctcctgaaagcttctcctaaaaaagctgctgttgctaaggctgccattgcggccgctgcagcagctaaagccaaggtcccagccaagaaggcaacaggaccaggccagaaggccgcagcgcagaaggcctctgcacagaaggctgcaggccagaaggcagcgccccctgctaaaggtcagaagggtcagaagaccccggcccagaaggcacctgctccaaaggcagctggcaagaaagcatgaggaggctacacaaagaataaaggttctttttgactgaaaaaaaaaaaaaaa

SEQ ID NO: 1595 - DNA, 1758 bp, Rattus norvegicus
gaatagcgtctcgggagtgtccctgggtaatcgctgcatctcgttttgtgtgtgtgctctgtcgaaacgtctgtgatgtgtgtatggttttcacgtgaacggaggcaggcagagttgggtctgtgggttctagtgtgttcttaatctttttggaagtttgtgcagtgacttcccctctgggattgtttcctatgcataccttcaagtatgtgtgaatgtgttttctgtggtcccttgatcttactgggcttctctaaggagggtggctggaccatctgctacgtgtctgggagcccctctctagctaccacatgtcccgacatgtgcttactcccaatatttgcacccactcgcattcacaactcccaggcaaaaagaaaaaatcaaaaaaacaaaaaaaacgtgcactggggcacctagaaaatgggcagccaaggctccgcctacattttgcttcctccttggaatttccagccctgtgcagccaactgctccctagctgcgaagggcggagtttcccggctctataagtagtggtgccttaccggggatccgcactcctccgtaccctctgtacagcgcgcgaattatgtgccattcgcgtaaccacctccacaccatgactggcctgagggctccggcgccagttccctccaccggcccggaactccggcggggctccggtcccggaattttcaccttcgaccccctcccggagcgggcggtagcgtccgccgtgcgtccgaacacttctcgcgggcacggaaaacgcagccgacgggtgctctaccctcgagtggtgagtatcgcccgagtgggcagcaagaggtcgagtcgccccggaacctttgggaacaactagatgcggggactttcgtctgacgtttccctcttttctctgctcaggtccggcgccagctaccaaccgaggaacccaacattgccaagaggatcctctttctcctgctcgccatcatcttctgccagattttgatggctgaagaaggtgtgtcgcaggccctggctccggaggatgctaccagcgccatatcacctgagcccatctctgcgcccattactgcgcctcctgtcctcgagcctttgaacctgacctcggagtcctcggactatgctctggatctcaaagcttttctccagcaacacccggcggcattctaaacgcgatgggtcacagtccggaaaaaaaaacccaaagagcaccaggggtacctggtcggcaagaacgtatcccaaactgggacttataaggcaacgctaactcagaacactaccgccaagatgccggttcttggggcgagcccgaggcaccgtgggtcctggctaggctcactggtgacggacggaggtcttctccgtgtctaattaatatttatgtatttatgtatatcctcctaggtgaaggaggggtgtatgtaatatttattctaacttatgcaggggtgcgagatatgcccccttgctgtgacacagatatttattacgatttatagggtccgtgagacagagttgtgggaggattagtttagtcttggtcggggggcataggtttaggggtaacactccattttccagcacttcgactctgttgtaagactttggcagacccttgggaatacggtctgtgtgcctttgatgtcttcctgactggaagtcttgggtccatggattgtcagagggcggctgtctggggtcgcctagtatgttctgtgaacacgaataaacttgatttgcctgtcg

SEQ ID NO: 1596 - DNA, 1780 bp, Rattus norvegicus
gccttcagtttcctgtactaagtgcttctgcccaccagagcaaccgattctaaggcctggctctagcaatggccttcgcaaatctgcgcaaaatactcatcagtgatagcctcgacccctgctgccggaagatcctgcaagatggagggctgcaggtggtggagaagcagaacttgagcaaggaggagctgatagccgaactccaggactgtgaaggccttatcgtccggtcagctactaaggtcactgctgatgtcatcaatgcagcagagaagctccaggtggtgggcagggctggtacaggcgtggacaatgtggatctggaggctgccacaaggaagggcgtcctcgtcatgaacacccccaatggaaatagcctcagtgctgcggaactcacctgtgggatgctcatgtgcctggccaggcagatcccccaggcgacggcttcgatgaaagatggcaaatgggaccggaagaagttcatggggacagagctgaacgggaagacactgggaattcttggcctgggcagaattggaagagaggtggccgcccgaatgcaggcctttggaatgaagactgtaggctatgaccccatcatttctccagaagtcgctgcctcctttggtgttcagcagctgccgctagaggagatctggcctctctgtgatttcatcactgtccataccccgctcctgccctccactacaggcttgctcaatgacagcacctttgcccagtgcaagaaaggcgtgcgggtggtgaactgtgctcgaggaggcattgtggatgaaggtgccctgctccgtgccctgcagtctggtcagtgtgctggtgctgcactggatgtgtttacagaagagccaccacgggaccgggccttagtggaccacgagaacgtcatcagctgtccccacctgggcgccagcaccaaggaggcccagagccgctgtggggaggaaatcgcagtccagtttgtggacatggtgaaggggaaatctctaacaggggttgtaaacgcccaggctcttaccagtgccttctctccacacaccaagccttggattggtctggcagaagcattgggcacgctgatgcacgcctgggctggctcccctaaagggaccatccaggtggtgacacaaggaacatctctgaagaatgctgggacctgcctgagccctgcggtcattgtcggccttctgagagaagcatcaaaacaggcagatgtgaacttggtgaacgctaagctactggtgaaagaggctggcctcaatgtcaccacctcccacagtcctggtgtcccaggagagcagggcatcggggaatgcctcctgactgtggccttggcaggtgccccctaccaagctgtgggcttggtccagggcaccacaccaatgttgcagatgctcaacggagctgtcttcaggccagaggtgcctctacgcaggggccagcccctgctcctgttccgggctcagccctccgaccctgtcatgctgcccactatgatcggcctactggcagaggcgggggtacagctgctgtcctaccagacctccaaggtgtctgacggagacacttggcacgtcatgggcctctcctccctactgcccagcctggacgcatggaagcagcatgtttctgaggctttccagttctgcttctgacccaggggctcagcggtcccagcccctcaggctcttctgaggaaacccgctcactgtgacctgaactaatatctagtaaagaatctaactccaaaaaaaaaaaaaaaaaa

SEQ ID NO: 1597 - DNA, 1716 bp, Rattus norvegicus
gaaagcttactagataaaaggtcaagcagtgacagaaaggaacacactgtgaacagaaggtttttgatttttaagatgcctgggaagtggatttctgctcttctgctgctacagataagttgctgtttccaatctgggaactgtgggaaggtgttggtgtggccgatggaattcagccactggatgaatataaaaacaatactggatgaacttgtacagaggggccatgaagtcagtgttctgaaaccttcggcttactatgttcttgatccgaaaaaatcgccagatcttaagtttgaaactttccctacatctgtcagtaaagatgaactggaaaattatttcataaagcttgtggatgtgtggacttatgagttgcaaagagatacatgtttgtcttattctcctttactacaaaatatgatagatgaattttctgattactatctaagtctttgtaaagacaccgtttcaaacaagcagctcatggcaaaactacaggaatccaagtttgatgttcttttgtcagatcctgtggctgcctgtggggagctgatagccgaagtgctccacattccttttctgtacagtcttcgcttctctccaggctacaaaattgaaaagtccagtggaagatttatattacctccatcttatgtaccagtaattttgtcaggaatgggtggcccaatgacattcatagacagggtaaaaaatatgatatgtacgctttattttgacttttggttccatatgtttaatgccaagaaatgggatccattttacagtgagatttttggaaggcccaccacattagctgagacaatgggcaaagcagaaatgtggctcattagatcctactgggatttggaatttccccacccaacattaccaaatgttgactatattggaggactccaatgcagacctcctaaacccttgcccaaggatatggaagattttgtccagagctctggagagcatggcgtggtggtgttttctctggggtcaatggtcagcagcatgacagaagaaaaggccaatgcaattgcatgggcccttgcccagattccacaaaaggttctttggaaatttgatggcaaaaccccagcaaccttaggacccaataccagagtctacaagtggcttccccagaatgacctccttggtcatccaaaaaccaaagcctttgtaactcatggtggagccaatggtgtctatgaggccatctatcatggaatccctatggttggcattcctatgtttggagaacaacatgataacattgcccacatggtggccaaaggagcagctgttacactgaatatcaggacaatgtcaaagacagatttgttcaatgcactaaaggaaataataaacaatccattctataaaaaaaatgctgtgtggttgtcaaccattcaccatgaccaacctatgaagcccctggacaaggctgtcttctggattgagtttgtcatgcgccacaaaggggccaagcacctgagaccacttggacatgaccttccctggtaccagtaccactctctggatgtgattggattcctgctctcctgttcggcagtcattgcagtccttactgtaaaatgcttcttgtttatttaccgactctttgtgaagaaggaaaagaaaatgaagaatgagtagagctcatttacaatgcactacaggaatgaaatttcagccacattctaa

SEQ ID NO: 1598 - DNA, 7225 bp, Rattus norvegicus
aagcttcttcccagaacctggaagcccagcaagcaaatgccctgcccccacccgacctccgccctcgttggcttcgcaaagctgtgatctgtggccagtagagggcacactttactttcgcaaatctgagagccacaacccgggggagggggcggggaaagagtctctgcagcaaaatgcagcctagggattggtggctcttggcgtttgaggcaaaatcctagaggctgtagtcattttgcaatccttaaagctgaattgtgcaatgagctcgatgaaggaagatactatcatccaacagctgaatcctaaattgcaaactcaatggctaatgactactttgaacaatgcgcaccttacacacgctacacgctactgtagtctcttctttttttagggggtagcagtgagaggtttcttaaaatgccttggggcgaggagtcctgaatgaggagactgctttgggttttgatgcgtaggataagcaaatcccgaggaaatatgcactatataataaatctagaaccaaaacacagagcaaaagattcatgtttcacgttggttaataaactaggttatcgtgtatatattaagtgtgtatacctttggggactctacaaaatgcacggcatggtattgaggaaaaagtaaattgggaaattagtgtaaaaattagagtcggcttttaattagtttaacacacacatacgaaggcaaagacacaacgttactttgatctgaccggggccgacctttttttaagtgcataattacgattccagtaataaaaggggaaagtttggggtttgtcctgagaggaaggggttaacggtttcctttattctagggtctccgcaggctccccagatctgggttggcaattctactcctccccctttctgggaagtccgggtttcccccaacccccaatccatggcatattctcgcgtctagcgccttgattcccgcccccccacacccccaacctctaagccggagtctggtgcaaactggctccacaggggcaaagaggatttgcctttagtggaaactggctgtggaactggaactctgagtggaggtgcatggggtgtagactggcagagactcgaccgggaggatccgggtagagcgcgcccaccgccgcagtcctactctactccagctctggaacgcgcagaaagacctacggggcaaggagccgcctccaccccaccccgcctggtggaaggtccgaacgggaggtgttggagtggagggcctttctggcagcaaattgggggattcattctgtaaagaatgtgcccagtcaacatagctgtacgcccaaacgcaaaatacacactgccctccccgagagatgcagtggctgtttattcctaagtggctctccaagtatacgtggcattgagttgctgagcaattttaatgattccaggcatcgtttttctgctcagacctcatctgtcgtaggtcttcaactatcactccacactgagcaagggctcctacataactctttttttttttcgtccttccctttttaaattctgtttccccgaccttagagagacgactggccgcccgagacgtgcgtgacgcggctcagggtacacggcgtattgtgtggagcgaggcagctgttccacctgcggtgactaatacacgcaggacaagaacacagttcagccgagcgctgcgcccgaacaactgtacagaaagggaaaggaccgacgcgcgagcaggagaaaatggtcgggcgcgcagttaattcatgctgcgctattactgtttacaccccgagtcggagtactgggctgcgggactgaggctcctcctctttccccggctccccactagtgcccctcccgagttcccaaagcagagggcgggggagcgagaggaggaaaaaaatagaggtcgggaggggagggagaaagagattctctggcctaatccccgcccacccgccctttataatccgggggtctgcgcggctaaggacccccgggctgcgctgctctccgctgccgcctccgccgcgcccactccgctcgcctcctgcctccaaaagggcaggcgttcgccgaggcttggcgggaaaaagaagcgaggggagggatccggagtcgcagtataaaagaagcttttcgggcgttttttttctgactcgctgtagtaattccagcgagagacagagggagtgagcgggcgggttggaagagcccagtgtgcagagccccactccgggcttcctaggaaggcagctctggagtgagaagggctttgcctccaggcttgctgcctcctcgacccaatcctcccgctgacccaacatcagcggtcgcaaccctcgccgcctctgggaaactttgcccattgcaacgggcagacacttctcactggaacttacaatctgcgagccaggacaggactccccaggcgcaggggagggaatttttgtctatttggggacagtgttctctgcctctgcccgcgatcggctcccctgaaaagagctcctcgcgttatttgaagcctgaatttcctttgggaggtggaaaacccggtaagcacagatctgttggtcttctactgttttctctacgtcctgagtgtagcgaccggttagaacagtctttattcaatttctgtgcttttgacactttactcagagtagttggggtaggccggggcggagttggggtggatctgagtcggggtagaacgacttgtcaagatgacaggaaaggggaaggaaaaaaccggggtgcattttgaaactgtcttccagaggttaccgtgggctgacgctgacccgggccggttggacattcttgctgtgctacattaattgatatttatgtcctttggggggggggtgtcaaagccggaggtctcttcgcggtggccaaaggaagcccttcgtatcctgaggtctttgggaaagggattaccttttgcgtgttctccgcaaaaagcgagaaggctccgtagcctctgacttcccagtctttgggagggcatttaaatttcggcttggtgcatttctgacagcctgagaccaactcgggggtgcgtcccgcccgccaatccccggcggcgattgcaaccggtccctgatccttttaagaagttgccattgggctttaaaaatagtgatcatagtaaaatttaagcctaaccctccgcggtattaggacttggtgttggactagcgcactgaggagaggcaaaactggggcagggatgtgacagattcgttgacttggggaaaaccagagggaatcctcacattcctggttgggatccgcgggtattccccgcgcccctgaattgctagggagactgcggtgagtcttgatctgagctgttcggtaacagctgctaccctcggcggggagagggaagacgccctgcaccgggtgctgaatcgctgtggggtctctggcgcagtggcgtcgcggtttagagtgtagcagggaggtgtctcttattatttgacaccccctcccctttggagaggcttgttagagcctgagactgagctctcccctccaagtcagcaataggaaagaaaagccggcaaaggaaggaaggggggcgcgctgggggtggagaaagaggagggcggagaggggcggcggcgccggctgggtaagagccgggcgacggcgcgagtagggacccggacccggtcggcggcgcaaagagccggcaccggagggggccgagcaccgcggcgcctctcgcctttctccttcaggtggcgcaaaactttgcgcctaggcttttggcagactgtattccctacagtcgcctccctcagcctctgaaggaggccaaggccgatggcgattcctgggcgtctgcagtgctaagtccctgctctaaggaggcggggactccgagcagctgctagtccgaccagcgtcactgatagtagggagtaaaagagtgcattccccccaaccacacacacacacacacacacacacacacacacacacacacacacacacacacttggaagtacagcaggctgaaaggggagtggttcaggattggggtacgcgctgcgccaggtttccgcatcaaccagagctgggtaactctagacttgcttcccttgctgtgccccctccaacagacagtcacgacgatgcccctcaacgtgagcttcgctaacaggaactatgacctcgactacgactcggtgcagccctatttcatctgcgacgaggaagagaatttctatcaccagcaacagcagagcgagctgcagccgcccgcacccagtgaggatatctggaagaaattcgagctgctgcccaccccgcccctgtcccccagccgccgctccgggctctgctctccgtcctatgtcgcggtcgctacgtccttctccccaagggaggacgatgacggtggcggtggcaacttctccaccgccgatcagctggagatgatgaccgagctacttggaggagacatggtgaatcagagcttcatctgcgatcctgacgatgagaccttcatcaagaacatcatcatccaggactgtatgtggagcggcttctcggccgctgccaaactggtctccgagaagctggcctcttaccaggctgcgcgcaaagacagcaccagcctgagccccgcccgcgggcacagcgtctgctccacctccagcctgtacctgcaggacctcaccgccgcagcgtccgagtgcatcgacccctcagtggtcttcccctacccgctcaacgacagcagctcgcccaaatcctgtacctcgtccgattccacggccttctcttcttcctcggactcgctgctgtcctccgagtcctccccacgggccacccctgagcccctagtgctgcatgaagagacaccgcccaccaccagcagcgactctggtaagccgccccaaccccagcagggtaggaagccagaggttggatggacctccttctcattggcattaattcaattggcccccgggctcaccctttctttcccttcggtctaagctcttcatccctggactcctgtgcttcagatatccctccccttcccccagaccgccctggttgtcagccccacccccacccttcccacccctcaggaatttcatttgggtttttaaatcttctggcttatctttcaactcaatccactccctttacccctcctaggcattttaattacccagagaagggtgtgaaggaggatagggaactgatcctgagaagagtgaatgaattacctgcttttctttgacttcagaagaatatttgaatttaatgtctacaagacccaagagaagcaatgacagaagcaggacagcctttagcctcagagccaggcactagtgaaagatcctgaagagttgaagagctgttttccctccatcccgttttgaacacttcaaagcaaatcctcttcagtttggattttcgtaccccctccctccccaaatgctcgccccaccactgccaccaccaggacaggacgtttggcaaaaccacaagactttactattgcacttccagtaatatagggagttggtaaagtcatagcaagatatttgcagctatcgcctacaggacctgaagggttcttggtgaagtcccttaaaaatgggaggtgcttgggaatgtgctttgctttgggtgtgtctgaagcctcattaagtcttaggtaagaattggcaacgatgccatatcctggtacatggtaattttctcacctgtgccctaaccctgttctacctttctgggaaacgggaggatggtgtctagatctggttcttacttctcaatcctttccaacttggcacttggatagcatcggtcaaacccccatctgggattcaggaggcattgctaactaatcttccacttccttccttacagaagaagaacaagatgatgaggaagaaattgatgtggtgtctgtggaaaagaggcaaccccctgccaagaggtccgagtcagggtcatccccatcaagaggccacagcaaacctccacacagcccactggtcctcaagaggtgccatgtctctactcaccagcacaattatgcagcacccccctccacaaggaaggactatccagctgccaagagggccaagttggacagtggcagggtcctgaaacagatcagcaacaaccgcaaatgctccagccccaggtcctcagacaccgaggaaaacgacaagaggcggacacacaacgtcttggaacgtcagaggagaaacgagctgaagcgtagcttttttgccctgcgcgaccagatccctgagttggaaaacaacgaaaaggcccccaaggtagttatcctcaaaaaagccaccgcctacatcctgtccgttcaagcagatgagcacaaactcatctcagaaaaggacttactgaggaaacggcgagaacagttgaaacacaaactcgaacagcttcgaaactctggtgcataaactgaccggaagtgaggaggagctggaatctcgagtgtaaggagaacggttccttctgacagaacttggacttcaaaaaatgcatgctcaaagcctaacctcacaaccttggctggggctttgggacttcagccataatgttaactgcctcaaagttaaggcataaaagaacttttttttatgcttcccatcttctttctttttcctttaacagatttgtatttaattgttttttttaaaaaaatcttccggtgtacatagggcctttaaatgtaaataactttaataaaacgtttataacagttatacaagattttaagacatgtatgataaaccataattttttttatttaaagaccttttcatttttaaagttgatttttttctattgtttttagaaaaaataaaataattggaaaaaatataattgagccaactcttaaatggtgttttcttttttttttttcctccaatttctcttcctcaactatagatgaacagaactgaccgtcttcccaggacgggtttacaagggtgggaaggggttatcttaaaatggggcgggggaggggggtgcctcaagacctctaagttcccagtgttatgagatcctttctgtggatgctgataggatgagagttgagaaagggcaaaaggcaagtgaggttagatacaaggaacagggaagcaagaggttaaagatagcagacagggaagagatggcagaatgaatctcctgcagtt

SEQ ID NO: 1599 - DNA, 3628 bp, Rattus norvegicus
tggggatgctagtgcctactgcgctggctgctcggctgctgagcctgttccagcaacagctgggttccctctggagtggcctggccatgctgttctgctggctgagaatagcattggggtggccagatcctggaaagggacagccacgggtccggggtgagcccaaggagactcaggagacccacgaagatccaggcagtgctcagcccacaacccccgttagtgtcaactaccacttcacgcgtcagtgcaactacaaatgtggcttctgcttccacacggccaagacatccttcgtgctgcccctggaggaggccaagcgaggactgcttctgctcaaacaggctggtatggagaagatcaacttttcaggaggagaacccttcctacaggacaggggtgaatacttgggcaagctcgtgagattctgcaaggaggagctagccctgccctctgtgagcatagtgagcaatggcagccttatccgagagagatggttcaaggactatggagactatttggacattcttgctatctcctgtgacagctttgatgagcaggttaatgttctcattggtcgtggccaagggaaaaagaaccatgtggaaaaccttcaaaagctgcggaagtggtgcagggattacaaggtggctttcaagatcaattccgtcattaatcgcttcaacgtggacgaagatatgaatgagcacatcaaggcgctgagccctgtccgctggaaggttttccaatgcctcctgattgagggtgagaactcaggagaagatgccctgagggaagcagaaagatttcttataagcaatgaagaatttgaagcattcttacagcgtcacaaagatgtgtcctgcttggtgcctgaatctaaccagaagatgaaagactcctaccttatcctggatgaatatatgcgctttttgaactgtaccggtggccggaaggacccttccaggtccatcctggatgttggcgtggaggaagcgatcaaattcagtgggtttgatgagaagatgtttctgaagcgcggggggaagtatgtatggagtaaggctgacctgaagctagactggtgaggtgagattggacggagactctaaccagctacgaggagtccacgagcagccgctcgccaccacgcacatctggctgtctacggactgttgctactgagaatgcactctatgttctttctttcagtttgactgaactaagaaaggagtaaaaccattctgtgaacccttatacagccgataagggtcctccacaggggaaggagttcagttcacagaggaacaaggtccagcgatctcaaagaactcacattttatttgtattcgaatttttgtatggatcgttactgtgaatcccatgtttccttttccctttctgttcccccatgagaaactgggttattttctgctaactatgccagttttgtcaacaggaaggatcacaaaacacaccctgcgattactgctgactgttctaatgcttttctgctttggaatctcggactttttgctcagaaatatagaatcaagaagtgtgttatagagccgtacgtgagaaccttactcttttgcaaggagcatatggaaggaggtacttctgaggacggtgtgttcatggcctcagcctctgctgctgctgctgcttcaaggatggctgttctatatcgtaccaattccttcaaggttctggacaaagccaaggtacactttacctttcatggcatggccgtgaagatggcactgacagccgcaaccaccccagcactgaggctgcctgagtctgtcaggctaaaaggttgtcccacttttctgaaaagctacaagggctcttctgcacatccagcagaatcatgacaggatgggcatggaggactcttcaggagtatgaaatgtggctgctgctccttaccatatttctcatgaaactctgaaataagacctagtagtctaggtcaccatgagaaaataatttcttctctacatcaaataagcaaaagagagaacatgaactagcccaaatcttcttcctgtggaagcattgcatgagtttattcaacctagacagcctcactgcttggaaaataattccctggaaattaaataaataccatggaaaagaaattaaactcctctgcaatcccactgtggccactagagggcaccaggaagtcagacttcattgtctcagagacttttcttcagtctttttttagaatttggtgaattttaattctgttccttatctgttttgtctttgttttttgttttggtgcctattactaaaattaatactaaacattttccaaggaactggaattttggccatttacaaaaggtcttcattctttagtgaggtcactataattcaactaagacatactctgtctcattaaaaataggtcaggttttcctgtgttttctgtcttgtttggttgtgtgtgtgtgtttacctatttttgcttgaatatagatataactatgtatcccaggctagcctggaactcatgatacctctgccttaacctccccctcttaagtgcccaggaattacccaactcctgtacagagatttttaagagaagtttgagtcacattcccccctgcagattgtgatttttttttttaagttaagtcctgtgtacatagttcacatgggaaaccatgacatcccagaggacatgggcagacacccacttggtcacacgacagagggaagctgcatgtttctttccctaattaaagtagagcatgaagaaagtatgattggaaagtgagccatcatttacatgtacccccaaccccttgtgcatgcactggcggtgggagatctctgtgcttaaaatattgaaaagtcccctttccttaaagggaaaaattacgatattttactatcgtagtacaaatcaaacttggattagatcatacattggtttgctttttcagtgttaaatktgggtgttcattttgtaaagcatacgctccctgctggggaaacaaggagtgatctagttgacatttgttaagtgtgaccagcagataccttgtgtcccatgattgatttatgcagagcagtaatactgggaagggggatttacttaagaacatcgacgggtaggacatccaacactgatttcaaagttttggcttctttattataatgtgttcggcggtaaaaaaaagtcatgggttgttttctttgaagctgaaagtctcatggtgttatttacctaaattatctgaaaaatttaaaaggggcccaggtttcattctgcgttggagtttgggggtctaattgttgcataaataaacaggcaaccaatcatcagaggttgactcctcccatcaataattcagctcgtgttttacccttttgatggactgatgttgtttcataagctattagtagtccaagaacaatcatgcaggcctcatgtgaatgtgttcagatgaggtttgatgttcgggatacatgtgcatgtatctccctgtagaatgacactgtattttgaggcattgctctagtgtatggaaacgtgatctgtgtattaaaatgttttatgcatgacctcaaaaaaaaaaaaaaaaaaaaaaaaaaaaaaaga

SEQ ID NO: 1600 - DNA, 1662 bp, Rattus norvegicus
cattcagtttagtcagaatccatgggtgggctcagctgtctcctccgtacctagtctgcggttatggcttcgctcacggtgaaggcctatctactgggcaaggaggaggcggcccgcgagatccgccgcttcagcttctgcttcagcccggagccggaggcggaagccgcggctggcccggggccctgcgagaggctgctgagccgggtggctgtgctgttccccgcgctgcggcctggaggctttcaggcgcactaccgcgatgaggatggggacttggtcgccttctccagtgatgaggaactgacaatggccatgtcctatgtgaaagatgacatcttccgcatctacattaaagagaagaaggagtgccggcgggaacatcgccccccatgtgctcaggaggcacgaagcatggtgcaccccaacgtgatttgtgatggttgcaatgggcctgtggtgggaactcgctataagtgcagtgtgtgccccgactacgacctgtgcagcgtctgcgaggggaagggcctgcacagggagcacagcaagctcatctttcccaacccctttggccacctctctgatagcttctctcatagccgctggcttcggaagctgaaacatgggcactttggctggcctggctgggagatgggcccaccagggaactggagcccacgtcctcctcgcgcaggggatggtcgcccttgccccacagctgagtcggcttctgctccatcagaggatcccaatgtcaatttcctgaagaatgtgggggagagcgtggcagctgccctcagccctctaggcatcgaggttgacattgatgtggaacatggagggaagagaagccgcctgacacccacctctgcagaaagttccagcacaggcacagaagataagagtggtactcagccaagcagctgctcttcggaagtcagcaaacctgacggggccggggagggccctgctcagtctctgacagagcagatgaagaagatagccttggagtcggtgggacagccagaggaactgatggagtcggataactgctcaggaggggatgacgactggacgcatttgtcttctaaagaagtggacccatccacaggtgaactccagtctctacagatgccagaatcggaagggccaagctctctagacccctcacaggaaggccccacagggctgaaggaagctgccctgtacccacatctcccaccagaggctgatccccggctgattgagtcactctctcagatgctgtccatgggtttctcggatgaaggcggctggctcaccaggctcctacagaccaagaattatgacatcggggctgctctggacacgatccagtattcaaagcaccctccaccattgtgacagtgctgtggccaagtcccacaacccacctcccttgtcttctagttgcatcatgtagagtagcagggcttctaaggcccagtgtcttggcattcttctagaaccttcaggtgggactgtgaggccttcttaggcagtaggaaagtgcatgagaagagagtctgagtgtgcacatgctgacccctgagcacagatccaagcagctgtggctgggcttmcgctgctttccctcggcctggcctttgccagggagctgtggagtcatgctgcactccactt

SEQ ID NO: 1601 - DNA, 1711 bp, Rattus norvegicus
cgggcctacggctcagtctaaggactgcaaataggcagctggccactagaggatctctaacttttcctacgaaactgagggctgaagtcaaagatacaaaatggtggcctcgtctttcgctgtcctgagagcaagcaggttgtgccaatggggttggaagagctggacgcagctgtcaggtcctccgccgctcagcaccggtggccggaccacttttgcgcggacaaatgctacgctgagcctggagcccgggagccgcagctgctgggacgagccgttgagcatcaccgtgcgcggcctggcccccgagcagcccgtcacgctgcgcgcggccctgcgtgacgagaagggcgcgctcttccgagcccacgcgcgctaccgcgccgacgccggtggtgagctggacctggcgcgcgctcccgcgctgggcggcagcttcacggggctcgagcccatggggctgatctgggccatggagcccgaacggcctctctggcgcctggtcaagcgcgacgtgcagaagccttatgtggtggagctggaggtgctggacggacacgagcccgacggcggtcagcggctggcacaggcagtgcacgagcgtcacttcatggctccaggggtgcggcgcgtgcccgtgcgcgacgggcgggtgcgcgccacgctcttcctgcccccagaacctgggccctttcctgaaatcatagacctttttggagttggaggcggccttctggagtaccgggcgagtctgctggctgggaagggttttgccgtcatggctctggcttattacaactacgacgacctccccaagaccatggaaaccatgcgcattgagtactttgaagaagccgtgaactacctgcgtggccaccctgaggtaaaaggaccaggaattgggctgcttgggatttccaaagggggtgaacttggccttgctatggcctccttcctgaagggcatcacggctgctgttgtcatcaatggctccgtggctgctgttgggaacaccgtatgctacaaggatgagactataccccctgtgtcccttctgagagacaaagtcaaaatgaccaaagatggtctcttggatgtcgtggaagctctgcaaagccctttggtagacaagaagagcttcatccctgtggaaaggtctgacacgaccttcctgttcctcgttggtcaggatgaccacaactggaagagcgagttctatgccagagaggcctccaaacgcttgcaggcccacgggaaagagaagccccagatcatctgctacccagaagcagggcactatatcgagcctccttacttcccactgtgcagcgctggcatgcacctcttggtgggtgctaacatcacctttggaggggagcctaagcctcactctgtggcccagttggatgcatggcagcaactccagactttcttccacaaacagttgagtggtaagagttaggaggtgccccctaaaatataacctgttatgtggtggtttggggaaaaacccaaatatcagaatgccacttcagtttagttcatttgaacacatactaatttttttaagtttctttcttccttcctttctttctttctgttttttttttttgttgttgttgttgttgtttgtttgtttgtttgagacagggtttgtctgtttacccctggctggcctggaacttgctttgtagaccagaggctaggcctg

SEQ ID NO: 1602 - DNA, 2597 bp, Rattus norvegicus
gcgaaaaagaacttgttaaatcctttgggctcacataagagcaatttatttttgtgccttcctttggacatagtaattagtcctagatggcctttcaggacctcctgaatcaagttggcagcctggggaggttccagatccttcagatgactttcattttgatcttcaacataataatttctcctcattctctattggagaacttcacagcagtcattcccaatcatcgctgctgggtccccatcctcgacaatgacactgtctctggtaatgacaatgggaacctgagccaagatgacctcctgagggtctctatccccctggactccgatctgagaccagagaagtgtcgtcgctttgtccaaccacagtgggatctccttcatctaaacggtaccttttccagtgtgacagagccagacacagagccctgtgtggatggctgggtgtatgaccaaagcacctttctttccaccattattaccgagtgggacctggtgtgtgaatctcagtcactggattcaatagctaagtttctattcttgactggtatcttagtaggaaatatcctatatggccccttaacagacaggtttgggaggaggttaatccttatatgtgcctcactgcaaatggccgtcactgaaacctgtgcagcttttgctcccacctttctcatctactgctcactacgattcctggcagggatttccttctcaaccgttttgaccaatagtgccttgctcattatagaatggacaaggcctaaattccaagccttggcaacaggactgctattatgtgctggagcaattggacagacagtattggcaggcctggcttttactgtgcgaaactggcaccacctccatctggcaatgtctgtaccaatatttttcttacttgtacccacaaggtggctgtcagagtcagcgcggtggctgattatgaccaacaaactccagaagggcttaaaagaacttataaaagttgcacacataaatggaatgaagaattcaacagatgtcctaaccattgaggttgtgagaacaatcatgaaggaggagctggaggcctcacagacaaaatcttccctgtgggacttgttccgtacacctaacttgcgtaagcggatatgccttctgtcccttgtgagatttgtggtatggttatctgtgattggtttactgatcaacttccagcacctaaggatcaatgtcttcctattgcagtgtcttcttggtataatcaccattccagccaatttagttggaatttttttggtgaatcacttgggtcgcagaataagtcaactatttatcatatccctgtttggaatttccattttggccataatatttgtgcctcaagaaatgcagatcctgcgcatggttttggcaacttttggaggagtattttcttttgtctctgttagcagtgctcttgtgcatgcaaatgagctacttcccactataatcagggcaactgctttaggagtcattggaattgctggtagtactggggcagccctgtctcctctgtttatgatccttaggacatactctgactccttgccctggatcatctatggagtcctttccttccttggtggccttgttgtccttctcctccctgagaccaagaatcagcctctgcctgactccatacaggatgtggaaaatgaaggaagagcctccagacaaggaaagcagaatgatactctcatcaaagtgacacagttttaagagactccaagagctgaaatctgataaaggagcaagataagaaaactgtcactcagatttatgatggcccaggttcactctagatacagcaaaattccttatcaagtaacgatatagcaaaaattttgtattacatttaaaatttccacattcaactgatacttaaattatctcaataacaaaattaaaggaaaacaacacagtgaaataaatcttcagagttttaatagacacttatgaagtttccacaaaggatgtggatgaaccttcttcccattattgtgacataatgcttgggaaaattaaaaatggataatttattgtgaaattcccattagtttcatcccactgctgttgcgataatctcctgtgtactatgtagatgaccgtctttgtattattcaagtgctgatctcagtatcagcagagatttaagtatagctggactttggtattattatttttatgaagcatcaccagtctcagtattctgtaaacatcttctctatcaccttctgattggtataataaaaaggcgaatggcctatgccagggcaggagaggaaaggtagatatttcatttgttgagagatagaaactctgggaaagagttgatgatgaaattgatcagcgaaatgtgctagaagcctcagaattttgtaaaaaacaccatgttaacagtaaagatttgaagaaagatttttctaacaagcccaagttctgggcaacaagcccagaaaattataaggaaatgtcctacttgttctttgtataacctaacaccatcacttgcagaaagtaacccaaagatacccaaagaaataaaattttacaagtgtaaaaagagagaga

SEQ ID NO: 1603 - DNA, 342 bp, Rattus norvegicus
atgtcggcgtcggtagtgtccgtcatctcccggttcctggaggagtacttgagctccactccacagcggctgaagttgctggatgcctatctcctttatatattgctgaccggggcgctgcagttcggctactgtctcctcgtgggcaccttccccttcaactctttcctctctggcttcatctcttgtgtgggcagcttcatcttagcggtttgcttgagaatacagatcaacccccagaacaaggcggatttccaaggcatctctcctgagcgagcctttgctgattttctctttgccagcactatcctgcacctcgtcgtcatgaactttgttggctga

SEQ ID NO: 1604 - DNA, 1632 bp, Rattus norvegicus
atggagcaggtgaatgagctaaaggagaagggcaataaggccctgagtgctgggaacattgatgatgccttacagtgctactctgaggcaattaaactagatcctcagaaccatgtgctctatagcaatcgctctgcagcctatgccaagaaaggagactaccagaaggcgtatgaggacggttgcaagactgttgacctgaagcctgactggggcaagggttattcaagaaaagcagcagcccttgagttcctaaaccggtttgaagaagccaaacgaacctatgaagaaggtttaaaacatgaagccaataatctacagcttaaggaaggcttgcagaacatggaggccaggttggcagagaggaaatttatgaatcctttcaacttgcctaatctgtaccagaagttagagaatgatcccaggacaaggacactgctcagtgaccccacctacagggaactcatagagcaactacagaacaagccttcagacctgggcacgaaactccaagatccccgggtcatgactactctcagtgtcctccttggagttgatctgggcagtatggatgaagaggaagaggcagcaacacccccacctccaccccctcctaaaaaggaggccaagccagaaccaatggaagaagatcttccagagaataagaaacaggctctgaaagaaaaggagctgggaaatgatgcctacaagaagaaagattttgacaaggccctgaagcattatgacaaggccaaggagctggaccctaccaatatgacttacataactaatcaagcagctgtgcactttgagaagggcgactacaacaaatgccgggagctctgtgagaaggccattgaagtaggcagagagaaccgagaggactaccgtcagatcgccaaagcttatgctcgaattggcaattcctatttcaaagaagaaaggtacaaggatgctatccatttctacaacaagtctctggcagagcaccgaaccccagatgtgctcaagaagtgccagcaggcagagaaaattctgaaggaacaagagcgactggcttatatcaaccctgatttggctttggaggaaaagaataagggcaatgagtgcttccagaaaggggactacccccaggccatgaagcactatacagaagccattaaaaggaacccaagagatgccaaactatacagcaaccgagccgcctgctacaccaagctcctggagtttcagctggcactcaaggactgtgaagagtgcatccagctagagccaaccttcatcaagggttatacacggaaagcagctgccctggaagccatgaaggactatacaaaagccatggatgtgtaccagaaggcattagacctggactccagctgtaaggaagcagcagatggttaccaacgctgtatgatggcacagtacaacagacatgatagccctgaggatgtgaaacggcgggccatggctgaccctgaggtacagcagataatgagtgacccagccatgaggctcatcctggagcagatgcaaaaggacccccaagctctgagcgaacacttaaagaatcctgtaatagcacagaagatccagaagctgatggatgtgggtctcatcgcaattcggtga

SEQ ID NO: 1605 - DNA, 1222 bp, Rattus norvegicus
tgctgtgacaggtgtgttaggtcatcatcaaccaccccatcatgctcctggtgtctaccgtgtccgctgtgcctgggctcttttcaccccctagctctcccagcaacagcagccaggaggaactactggatgatcgagacccgctgctagtccgggctgaactggccctgctatctacaatttttgtggctgtggccttgagcaatggcctagtgctgggggccctaatacggcggggccggcgtggacgctgggcacccatgcatgtcttcatcagtcatttgtgcctggctgacctggctgtggctctgtttcaagtgctaccccagctggcttgggatgccactgaccgcttccatggccctgatgccctgtgtcgggccgtcaagtacctgcagatggtgggcatgtatgcctcctcctacatgatcctggccatgacactagaccgccatcgtgccatctgccgccctatgctagcataccgccatggaggtggggctcgctggaacaggccagtgctggtggcctgggccttctcactccttctcagcctgcctcagctcttcatctttgctcagcgtgatgtgggaaatggcagtggggtgtttgattgctgggcccgatttgcagaaccatggggccttcgtgcctatgtcacctggattgccttgatggtgtttgtggcacctgccctaggcattgctgcctgtcaggttcttatcttccgggagatacacgccagtctggtgccagggccatccgagagggcagggacgccgcagagggcgccggacagaagccccagcgagggagcacatgtatcagcagccatggccaagaccgtgaggatgacactggtgattgtgattgtctacgtgctatgctgggcacccttcttcctcgtgcagctgtgggcagcgtgggatccggaagctcctctggaaagacccccctttgtgttgctcatgctgctggctagccttaacagctgtaccaacccttggatctatgcttccttcagtagcagtgtctcctcggagttgcgtagcctgctttgctgtgctcagaggcacaccacacacagcctgggtcctcaagatgaatcctgtgccacagccagctcctctttgatgaaggatacaccctcctgagtagctactgggctctttctactcaaaaaccctctgtagctcaactgactatctagggttggccctga

SEQ ID NO: 1606 - DNA, 1644 bp, Rattus norvegicus
gcactacaaagagaagatccacgagtacaatgtactgctagatacactgagcagagctgaagaaggttatgagaaccttctcagcccctctgacatgacccacatcaagagtgacaccctggccagcaagcacagtgaactgaaggacagactgcgtagtatcaaccagggcctagaccgcctgaggaaggtcagccaccagggctacggccccgccactgagtttgaagagccccgagtgatagatctgtgggacctggctcagtctgccaacttcactgagaaggaactggagtcgttcagggaggagcttaagcacttcgaggccaaaatcgaaaagcacaaccactaccagaagcagctggagatttcccaccagaagctgaagcacgtggagagcatcggtgaccccgagcacatcagccgcaacaaggagaagtacgtcctgctggaggagaagacaaaggagctgggctacaaggtgaagaagcatctgcaggacctgtccagcagggtctcaagggctcggcacaatgagctctgagaccagaagccactggcagtagcctagagaggctcttgaagacactgggaactgtcaacttgtcatactggtgtggctgtccacagtggcaaggagaaataccgatctgatcctgctgcggctggcaaggactaattttctttcaagcaagtgtagctgtcaccgccctggttgagggctttgggtacatctaccaatgagatatgaccggtctccatgctgcagcaaaagtttacattgaaattatataaatctgtcgccgacagtttattgaaaggaaatcttgctttatccatgaagtcacttccatggaggtagctgtgataaagtgtctcttccccatgacaacgcatagcaccaatccctactgaaagacctgcccgagtacaccaactgtcctggtggaatgacactctggagcaggaaaaacaaatttctaaaaggcatacagtgattatcttctgagctttgcagctggcaacatgtatgttttcacacaagatatttttaagctagcgaaagaaaatactcaagcaggattagttcttaaagcaataaacaggggaataaaaacatcatgtatatataagaaaaccaaggcatgctcacaggtttgagccaagaaagacctggagccctaatccccaccttgtcccaggatgcacctgtcatgatcacagggaagagatgagtctgggatttacaaacctctctctaaacctcagtccagtgttgtgccgctggctgtaccacacacaccgcacaagccccgactgctcccattccattacggcacaggagacatgttctcaccctgcctagcctgctttggtggggggaggcggcggcagggaactctacaagtgtttccagtggtgacctctgttctccctttcaggagctgttttccttcatgtagctagccccatggctaccagaaagaactagaataggagctggctgattttgtcaaaccccaaaacaaacacccctttcctccgggtcttgattttgtcacctgaatctctgggacgagtggccaaggcatttctaggcttactgcaagtatcagatgacgacataagattctagaagtcaag

SEQ ID NO: 1607 - DNA, 1311 bp, Rattus norvegicus
cggttttttttttttttcaacctagtgacagtcacagagcagcaccaccccctcctcctttccacacctgcaaactctcttgcttgggctgcattacttagtgttaattacatcgcagctttgagggctccggtggcaaatacccggattaaaaggtggtgaaaacgcatgagacaaccatgaaggcaactctcgtcttattccttctggcgcaagtctcttgggctggaccatttgagcagagaggattatttgacttcatgctagaagatgaggcctctggcataatcccttacgaccctgacaatcccctgatatctatgtgcccctaccgatgccaatgccatctccgagtggtgcagtgttctgatctgggtctggacaaagtaccctgggagtttccacctgacacaacattgctagacctgcaaaacaacaaaataacagagatcaaagagggggcctttaagaacctgaaggacttgcataccttgatccttgtcaacaacaagatcagcaagatcagcccagaggcatttaaacctctagtgaagttggaaaggctttatctgtctaagaaccacctaaaggagctgcccgaaaaattgcccaaaacactccaggagcttcgactccacgacaatgagatcaccaaactgaagaaatctgtgttcaatggactgaaccgtatgattgtcatagaactgggcggcaacccactgaaaaactctgggattgaaaatggagccttgcagggaatgaagggtctcggatacatccgcatctcagacaccaacataactgctattcctcaaggtctgcccacttctatcagtgaactgcatctggatggcaacaagatcgccaaagttgatgcagccagcctgaaaggaatgtctaatttgtctaagctgggtttgagcttcaatagcatcaccgttgtggaaaatggcagtctggctaatgttcctcatctgagggagctccacttggacaacaacaaactcctcagagtgcctgctgggctggcacagcataaatatgtccaggtcgtctaccttcataacaacaacatctccgaagttgggcagcatgacttctgcctcccttcataccagactaggaagacttcctacactgccgtgagtctttatagcaaccctgtccggtattggcaaattcacccacacaccttcagatgtgtcttcgggcgctctaccattcaacttgggaactacaagtaactcccaaacagcctcatttttataatcgggaacaaaaaaaccaatctgtcaatattattgctaaaaa

SEQ ID NO: 1608 - DNA, 4987 bp, Rattus norvegicus
atggaagtgtcaccattgcagcctgtaaatgaaaatatgctactcaacaaaaagaagaatgaagatggcaagaaaagactgtccgttgaaagaatctatcagaaaaaaacccaactggaacatatactgctccgcccagatacctacatcggctctgtggagttagtgacccagcaaatgtgggtttacgatgaagatgttggtattaactacagggaagtcacttttgttcctggtttgtataaaatctttgatgaaattctagttaatgctgctgataacaaacaaagggacccaaaaatgtcttgcattagagtcacaatgatgcgaaataatttaattagtatatggaataatggaaagggaattcctgttgttgaacacaaagtggagaaaatgtatgtcccagctctcatatttggacagctcctgacctccagtaactacgatgatgatgagaagaaagtgacaggtggtcgaaatggctatggagctaaactgtgtaacatattcagcaccaaatttactgtggaaacagccagtagggaatacaagaaaatgttcaaacagacatggatggataacatggggagagctggtgacatggagctcaagccctttagcggagaggattacacgtgtattaccttccagcctgacttatctaagtttaaaatgcaaagcctggacaaagatattgtcgcactgatggtcagaagagcatacgatattgctggttccaccaaagatgtaaaagtctttcttaatggaaacaggctgccagtcaaagggttccgtagttacgtggatatgtatttgaaggataaggttgatgaaactgggaacgctctgaaggtggtgcatgaacaagtaaatccccggtgggaagtgtgcttaacaatgagcgagaaaggctttcagcagattagcttcgtcaacagcatcgctacttctaagggtggcagacatgtcgattatgtagccgatcagattgtgagtaaactcgttgatgtggtgaaaaagaagaacaagggaggtgttgcagtgaaggccgatcaggtgaagaatcacatgtggatttttggaaatgcggtaattgaaaacccaacctttgattctcaaacaaaagaaaacatgactttacaagccaagagctttggatcaacttgtcaattaagtgaaaaattcatcaaagctgcaattggttgtggtattgtcgaaagcatactaaactgggtgaagtttaaggcccaaatccaattaaacaagaagtgttcagctgtaaaacataacaggatcaagggaatccccaaacttgacgacgccaatgacgcagggagccgaaactctgctgaatgcacacttatcctgactgaaggggactcagccaaaactctggcagtctcaggacttggagtggttggaagagacaaatatggggtgttccctctcagaggaaaaatactcaatgtgcgagaagcttctcataaacagatcatggaaaatgctgaaattaacaatatcatcaagattgtggggcttcagtacaagaaaaactatgaggatgaagattcattgaaaactcttcgttatgggaagatcatgattatgacagatcaggaccaagatggttcccacatcaaaggcttgctgatcaattttatccatcacaattggccatctcttctgcgacatcgttttctagaagaatttatcactcctattgtaaaggtatctaaaaacaagcaagaaatagcattctacagtcttcccgagtttgaagaatggaagagtacaaatccaaatcacaaaaaatggaaagtcaagtactacaaaggtttgggcacgagcacatcaaaggaagctaaggagtattttgcaaatatgaaacgacatcgtattcagttcaaatactctggccctgaagacgatgctgcgatcagcctggcctttagtaaaaaacaggtcgatgatcgaaaggaatggttaactaatttcatggaagatagaagacagcggaagttacttggccttcctgaggattatttgtatggacaaaccactatgtacctgacctataatgatttcattaacaaggaacttatcctcttttcaaactctgataatgaaagatctatcccatctatggtagatggtttgaaaccaggtcagagaaaggttttgtttacttgtttcaaacggaatgacaagcgagaggtgaaagttgcccagttagctgggtcagtggcagaaatgtcctcttatcaccatggtgagatgtcgctgatgatgaccattatcaatttggctcagaattttgtgggtagcaataatttgaaccttctacagcctattggtcagtttggtaccaggctgcatggtggcaaggactcagccagccctaggtacatctttacaatgctcagccctttggctcggttgttatttccatcaaaagatgatcacacgttacggtttctgtatgacgacaaccagcgtgttgagcctgaatggtacatccctattatacccatggtgctgataaatggtgctgagggaattggtactgggtggtcctgcaaaatccccaactttgatgttcgtgaagtcgtaaataatatcaggcggctgttggatggagaagagcctctgcccatgctcccaagttataagaattacaaaggtactattgaagaactggcttcaaatcagtatgtgattaatggagaagtagctattctgaattccacaaccattgagatcactgagcttcccatcagaacatggacccagacatataaggaacaggttctagaacctatgttgaatggcaccgagaagacaccccctctaataacagactatagggaataccacacagataccactgtgaagtttgtcataaagatgactgaagaaaaattggcagaggcagagagagtgggactacacaaagtcttcaaactccagactagtctcacttgcaactctatggtactttttgaccatgttggttgtttaaagaaatatgacactgtgttggatattctaagagacttctttgagctcaggcttaaatattatggattaagaaaagaatggcttctaggaatgcttggtgcagaatcttctaaactgaataatcaagctcgctttatattagagaaaatagatggcaaaatagtcattgaaaataaacctaagaaagaattaattaaagttctgattcagagaggctatgactccgaccctgtgaaagcctggaaagaagctcagcagaaggtcccagaagaagaggaaaatgaagagaatgaagagagcgagagtgaaagcacgagccctgcagcggagtctggaccgaccttcaactaccttcttgatatgcccctgtggtatctaaccaaggagaagaaggacgagctgtgcaagcaaagggacgagaaggaacaagagctcaacacgttaaagaaaaagactccatcggatttgtggaaggaagacctggctgcttttgtggaagaactggaggttgttgaagccaaggaaaaacaggatgaacaagtaggacttcctggaaagggggtgaaagcgaaggggaagaaagcgcagatatctgaagtcctgccttctcctgtggggaaaagggtcatcccgcaggtgactatggagatgagagctgaggcagagaagaaaatcaggaggaaaattaagagcgagaatgttgagggcacccctgctgaggatggtgctgagccaggactccggcagagactagagaagaggcagaagagagagccaggtaccagggcaaagaagcaaactacattgccatttaagcctatcaaaaaagcccaaaagcaaaacccttggtctgattctgaatcagatatgagcagcaacgaaagcaattttgatgtccctccacgagagaaagagccaagaattgctgcaacaaaagccaaattcacggcggatttagactctgatgacgatttctcaggcttggatgagaaggatgaggatgaagatttcttcccattagatgatactccacctaagaccaaaatgcccccaaaaaatactaaaaaagcactgaagccacagaagagctccacatcagttgatcttgaaagtgatgggaaagacagtgtaccagcttctccaggcgcttctgctgctgacgtcccagctgagactgaaccctccaagccgtcctccaaacagacagtgggagtgaagaggacaataaccaaaggtcagtctttaacctccactgctggcaccaaaaagagagctgtaccaaaggagaccaagtcagattcagccttgaatgctcatgtctccaaaaagcctgctcctgccaaagccaagaacagtcgcaagaggatgccatcttcttctgacagctcggactctgagtttgagaaggcgatttctaaaggtgccacaagcaagaaactcaagggagaggagcgggatttccatgtggacttagatgacactgtggctcctcgagcaaaatccggacgagcaaggaagccgattaagtacctggaggagtcggatgacgacctcttctaaggggtgaggggatttcaggaatggttttactgagccacgttagttttaaagttcttccttaaccactctgaatttaattggcaggaagacttttttttaaataagaatatgcaagtgagcaggcccctgtggccttcacctttgttctcaacatactgtcagtagtggccgtctcgtgggcattgtcgtcttctctgattgtctgttttatgtctgttttctttggtctctgaaacctggcttgaatattttttggattccacataattatatgcttactcagcacagtagcatttatcaatttaaactaaagtgcaaatggtttcaaaagcattcctgcctcctttcctatcccactaaatatgaggtaagacagcccttgttttcaattttataggtagaattc

SEQ ID NO: 1609 - DNA, 1758 bp, Rattus norvegicus
gagagggtggtgctggagggtgggaaggcggcacgagcgaggcctggcccggaagctaggtgagttcggcatccgagctgagggaccctagtctaagactccgctgctacccagtctgagtatctggtctccgtccctaatgggattctcgtccaaaccgtctggagcctgcagcgatccagtctctggccctcgaccaggttcactgcagctgtctagaggtccccaggagcagctgctggcgagcccgcttctgcaggaacctatggagccattccgtagtgccattccgagcgacgcactgccgcagcttctctgagcctttccagcaagtttgttcaagattggctcccaagaatcatggactgttattatatgccttgttttctgtcaagacaccatgattcctggtaaccgaatgctgatggtcgttttattatgccaagtcctgctaggaggcgcgacagatgctagtttgatacctgagaccgggaagaaaaaagtcgccgagattcagggccacgcgggaggacgccgctcagggcagagccatgagctcctgcgggacttcgaggcgacacttctgcagatgtttgggctgcgccgccgtccgcagccgagcaagagcgccgtcatcccggattacatgagggatctttaccggctccagtctggggaggaggaggaagaagagcagagccagggaaccgggcttgagtaccctgagcgtcctgccagcagagccaacactgtgaggagtttccatcacgaagaacatctggagaacatcccagggaccagtgagagctctgcttttcgtttcttctttaacctcagcagcatcccagagaatgaggtgatctcctctgcagagctccggctatttcgggagcaggtggaccagggccctgactgggaacagggcttccaccgtataaacatttatgaggttatgaagcccccagcagaaatggtgcctggacacctcatcacacgactactggacaccagactagtccgtcacaatgtgacacggtgggaaactttcgatgtgagccctgcagtccttcgatggacccgggaaaagcaacccaactatgggctggccattgaggtgactcacctccaccagacacggacccaccagggccaacatgtcaggattagccgatcgttacctcaagggagtggaaattgggcccaactccggcccctcctggtcacttttggccacgatggccggggtcataccttgacccgccggagggccaagcgtagtcccaagcatcacccacagcgctccaggaagaagaataagaactgccgtcgccattcgctctacgtggacttcagtgacgtgggctggaatgattggatcgtggccccaccaggctaccaggccttctactgccacggggactgtccctttccactggcggaccacctcaactcaaccaatcatgccattgtgcagaccctggtcaactccgttaattctagcatccctaaggcctgctgtgtccccaccgaactgagcgccatttccatgttgtatctggacgagtacgacaaggtggtgttgaaaaattatcaggagatggtggtggaggggtgcggatgccgctgaaatcaggcagtccggaggacggatgcacacacacacacacacacaaagcccatccgaccacccacacataccacacaaagtgcttccctatagctggacttttacttaaaaaaaaaaaaaaaaaactcgag

SEQ ID NO: 1610 - DNA, 1729 bp, Rattus norvegicus
ggctcacaagcagctggccagttctggggaggcagctcagaggctctttctcaggcctctagctgggtctgtcctgtacttcaccagaggaaaaacgttcttgggagagcttgtcaggtgtggaacctcagccatggtggccttcttgttctgcaacctgctactggtggcctgtggctctgtcacctggaccatgtcagataccggagagtccggtgtcgacttagcagaccggcttgacctggttgagaagataggcgacacgcactccaaagacctggagatctggatggagctaggaaaacaacgggaggcggatgccagggagatgcacgcagtctgcagggtacagccctcagccatgctgcctcccgatcagccacagatcacaggcttggtcctcttccggcagctggggcccagctccagacttgaggcctccttcaatctggagggcttcccagccgagcagaacacctccaaccacgccatccacgtgcatgagttcggggacctgagccagggctgcgagtccaccggaccacactacaacccgctgggtgtgccgcacccacagcacccgggggacttcggcaacttcgtggtgcgcgatggccgcctttggaagcatcgaatgggcctggccacgtcactggccggaccgcactcgatcttgggccgcgctgtggtggtccacgctggcgaggacgacctgggtaaaggtggcaaccaggccagcgtgcagaacggcaacgcaggtcgccggctcgcctgctgcgtggtaggcaccagcaactcggaggcctgggagagccagacaaaggagcgcaagaagcggcggcgggagagcgagtgcaagaccacttaagcatcacccagggccgcctagcctagctgctgcgcgcatagatgcctccacacgcgccctctagacgcctccagtcatcctagaggtctctgggtgtcctagactgacgcttcccagacacctcaatcgcctctgtgcgccccacactcttccacataccccagacacctctgtatggctcagatgccttcaagaacctcctcggccacgtccacgagccccagatgttcccacgtgccctgggcactgttctcggagaccaggacacttttttgtaacctaggaatccttcacacctatgcactccacagaccaactccttcgtgctctaggtccacctcgaactactttatgccccaagacaatcccataagcccctagcatcccctttgaaacagtctttgagtttgctcccagagaattccccgcttacccccagaggtcgaatgtgcgcagataactctccttttactctgaggacatcccagtggaccttctagagaactcccttggggtgttctgaaatatcaccaccccacttccttctgcccccttttgttttctttctgtcccctagcacccgagacttctctcttccctagagacctcgtttgtcttccccttgttcctcctagggctctgggaccaccctgacacacacacacacacacacacacacacacacacacacacacacacacacacatccctaagattccatgttcctgatcacctcctgccgggcccctggttctgttttcatctgtttcccatatggtgcctgcaccccaaggagagcagctcctccgagagtatttgacaacctttatgctgctcattaaaaccacagcaattcaaaaa

SEQ ID NO: 1611 - DNA, 1366 bp, Rattus norvegicus
ccagggcaaccgcacgacccccagctacgtggccttcaccgacaccgagcggctcatcggggacgcggccaagaaccaggtggcgctgaacccgcagaacaccgtgttcgacgcgaagcggctgatcggccgcaagttcggcgacccggtggtgcagtcggacatgaagcactggcccttccaggtggtgaacgacggcgacaagcccaaggtgcaggtgaactacaagggcgagaaccggtcgttctacccggaggagatctcgtccatggtgctgaccaagatgaaggagatcgccgaggcgtacctgggccacccggtgaccaacgcggtgatcaccgtgcccgcctacttcaacgactcgcagcggcaggccaccaaggacgcgggcgtgatccggggtctgaacgtgctgcggatcatcaacgagcccacggcggccgccatcgcctacgggctggaccggaccggcaagggcgagcgcaacgtgctcatcttcgacctggggggtggcacgttcgacgtgtccatcctgacgatcgacgacggcatcttcgaggtgaaggccacggcgggcgacacgcacctgggcggggaggacttcgacaaccggctggtgagccacttcgtggaggagttcaagaggaagcacaagaaggacatcagccagaacaagcgcgcggtgcggcgactgcgcacgggctgcgagagggccaagaggacgctgtcgtccagcacccaggccagcctggagatcgactctctgttcgagggcatcgacttctacacgtccatcacgcgggcgcagttcgaggagctgtgctcggacctgttccgcggcaccgtggagcccgtggagaaggccctgcgcgacgccaagctggacaaggcgcagatccacgacctggtgctggtgggcggctcgacgcgcatccccaaggtgcagaagctgctgcaggacttcttcaacgggcgcgacctgaacaagagcatcaatccggacgaggcggtggactacggggcggcggtgcaggcggccatcctgatgggggacaagtcggagaacgtgcaggacctgctgctgctggacgtggacgacgtgtcgctgggtctggagacggcgggcggcgtgatgacggcgctcatcaagcgcaactccaccatccccaccaagcagacgcagaccttcaccacctactcggacaaccagcccggggtgctgatccaggtgtacgagggcgagagggccatgacgcgcgacaacaacctgctggggcgcttcgagttgagcggcatcccgccggctcccaggggcgtgccccagatcgaggtgaccttcgacatcgaaccccaacggcatcctgaa

SEQ ID NO: 1612 - DNA, 628 bp, Rattus norvegicus
tgaattcctggaacctcaactggctcccactgctctctcggtgcagttaccgtttggcgatccctctcctgctaacatgccgttcgttgagttggaaacaaacttgccggctagccgcatacccgcagggctggagaaccggttgtgtgcggccacagccaccatcctggacaaacccgaagaccgcgtgagcgtgacgatacgaccgggcatgaccttgttgatgaacaaatccacagagccctgcgcccacctcctgatctcttccatcggtgttgtgggcaccgcggagcagaaccgcagccacagctccagcttcttcaagttcctcaccgaggagctgtccctggaccaggacaggatcattatccgattcttccccttggagccctggcagatcggaaagaaaggaactgttatgacgtttctgtgatggagacaaggaacgcagggcgtttgcttgagcctgtccagagcccttccagagaggcctcctggcagatacgataccagatccctcttttgcataagtgtctgtgatctcactgacctgttttcctctcccccagcctcgtgaacgagagagcaataaagaagagagcataatcccaaaaaaaaaaaaaaaaaa

SEQ ID NO: 1613 - DNA, 1475 bp, Rattus norvegicus
tgcccaaacaccagcacactaggggttcttcacgatctctatccagagcaaacaggcgaaccgagggttaaggggcggggcctcttcgaggggcggggcctcgggcggagcggggtcgggcttcgcgcacctgtaggttctgtctagggatccgctgtcgcagccccggagcagcgccgggagcgcgtcccgagcgtcgtaggctcgcgatcgctatggcggagttcccgtcgaaagtgagcaccaggaccagcagccccgcgcagggcgtgggagcatctgtgtctgcgatgcgaccggacctgggctttgtgcgctccgcccttggggtgctcgcgcttctgcagctggtgctggggctgctggtgtgggccttgattgctgacaccccataccacctgtatcctgcctacggctgggttatgtttgtagctgtcttcctctggctggtaacaattgtcttcttcatcatctacctgtttcaactgcacatgaagttgtatatggtgccctggccgttggtgttactggtcttctttgttgctgccaccgtcctctatatcaccgcctttgtcgcctgtgcggcggcggtcgatctgacatccctgaggggctcccgaccgtacaaccagcgctcggctgcctctttctttgcttgtctggtgatgattgcctacggactgagtgctttcttcagcttccaggcctggcgaggagtgggcagcaacgcggccacgagtcagatggctgggggctactcttaagccagctatgctgtgacctaagccacggctgggtcttagcacagggccacccccaaccttaccaggcttaagctctccaagcactcctgaggaacaggcccaagctggcacagatggacagccaagagccaggagcggggacatcctcctcacctcccttattcagcagaagatgatggggttggggggctcttgtggctttgccttgtcatcagagaacttcagtgtcccaggctgggccaccctgctcaccagcactaaatgcactaacagaccttcagcctctgatctgcctagtgtaaacctaacaagacaacacatgatctacgttccagaagctaagcccacccccaggctcttctggacccacctccccctcccctaccgcacgccaacccattgtcacctgtagagagacttttatagaagagttgggatttcgaggactggactatttcagttggtttcaatagtttccaagacagcaagcctcaccatgtcccctccctcacgtggaactctttctctcctttgggagagagcatccgtgcagggtgctccccccaggctgctgattagacacaggggacttccaaggagggagagagggaagcagggccttgcctggtgagttgtcaggaggttaatggcgactcttatttggaattattattttttacaatttaaataaaaatggatgtgtctgtttgg

SEQ ID NO: 1614 - DNA, 1828 bp, Rattus norvegicus
gtggcactccgcagcactacccggagacagctaacagtgcagcccgagtgatctgggaagccgttctcagtgaccgacttttctagtcctgttccacgcgaccagcagagacatgaattactcaaggttcctcactgcaacgagcctggccagaaagacatcccctatcagagctacagtggagataatgagtagagcacccaaagacatcatctccctggctcctggatctccgaacccgaaagtgttcccctttaagtcagctgtcttcactgtggagaacggaagcaccatccggtttgaaggagagatgtttcaaagggccctccaatattcctcaagctatggaattccagaacttctgtcctggctaaaacagttgcaaataaaattgcataatcctccgactgtcaactactcacccaacgaaggacagatggacctctgcatcacatctggctgtcaagacggtctctgtaaggtgtttgaaatgctcatcaatcctggagacactgttctggtcaatgaaccactgtattcaggagccctttttgcaatgaaaccactgggctgcaattttattagtgtccccagtgatgactgtgggattattccagagggtctcaaaaaagtactttcccagtggaaaccagaagattccaaggatcccacaaaaaggactccaaaatttctgtatactattccgaatggcaacaaccctacaggcaactcgttgactggtgaccgcaagaaagaaatctatgagcttgcaagaaaatatgacttcctcataatagaagacgatccttactattttctccagttcaccaagccttgggaaccaacctttctctccatggatgttgatgggagagttatcagagctgactccctttcaaaagttatctcctcagggctgagagtggggtttataactggccccaagtccttgatacagaggattgttctccacacacaaatctcatcactgcatccctgtactttatcacagctcatgatatcggagcttctataccagtggggagaagagggtttcctggcccatgttgacagagctattgatttctacaagaaccagagggattttatattggcagctgcagacaagtggttacgtggtttggcagagtggcatgttcccaaagctggcatgtttctatggattaaagttaacggaatctctgatgcaaaaaaactaattgaagaaaaggctattgaaagagagatcttgttagttcctggaaatagtttcttcgtcgataattcagccccctcctccttcttcagagcatccttctctcaggttactccagcgcagatggacttagtcttccagagattggcccaactcataaaagacgtttcataaagaaatcaaactcagcattgaacttataattttaaaataaatttcctatactttgctgaagaaatggctgacaggatggatccagtttgtgaaatatctgtggcaatttcactgaacaactttgaagccccttaaaatccaccgcattgccaaaataactttctgatatacttttgccctttgattaattatgaactaacaaaacatcaaatttcattgttaaagacctctgtagctgcttaataatgtccaataaatttttttgagcctaacatagactaactaacatagtaaattgcaagggaattagttaaaatggcctataatatgcaggtttttttctactttaaggaaatttcatgagcatttactgcaaaaattgttgtaatttgacaattataaattactttgtaaccgaaaaaaaaaaaaaaaaaaaaa

SEQ ID NO: 1615 - DNA, 707 bp, Rattus norvegicus
gctctgggtcggggcccaccatcgaggaggtggattagaggctctttctggcgctccaggtgtgatctaggagacagatgggtggccttgaggactttgggttattgtcgtttaggacattaactccttcgttcggtctgcaatcaagtcctaggtttaagcaaactgccttccatttactctgtggaatttcacgtgtgctttgcattcccagtaaattagtactgggagtgtgtctttgcaatagatataatttcctgccttcaagtcagcactgccccccccccgaagttatttctttgcaggacagtcagagctatattgatatagcaagaggtgtgttacaaaaacaccaggacactgttgagttcctttgtgtttggactctcccctgggcgacagtgttgaggcactgttaagtcaggagctcggggccaccggtggatcactgaaagctgagactctgttgcttctcccgtttgacactctgttgctttccttgcatggtggctcacctaaggctgagactcttgttctccttccctgtataatcttgcctggcgttgcacttgttccccagtgtgtgaactcggagatgagtttacaccaccactgttagttcacgttttttgtttttacataaccatcctgaactcaggtcaatttttagctggctatttgaaaataaacttcaaaagaacttgcca

SEQ ID NO: 1616 - DNA, 5721 bp, Rattus norvegicus
atgttcagctttgtggacctccggctcctgctcctcttaggggccactgccctcctgacgcatggccaagaagacatccctgaagtcagctgcatacacaatggcctaagggtccctaatggtgagacgtggaaacctgatgtatgcttgatctgtatctgccacaatggcacggctgtgtgcgatggcgtgctatgcaaagaagacttggactgtcccaacccccaaaaacgggagggcgagtgctgtcctttctgcccagaagaatatgtatcaccagacgcagaagtcataggagtcgagggacccaagggagaccctggcccccaaggcccaaggggacctgttggcccccctggacaagatggcatccctggacagcctggacttcctggtcctcctggtccccccggcccccccggaccccttggtcttggaggaaactttgcttcccagatgtcctatggctatgatgagaaatcagctggagtttccgtgcctggccccatgggtccttctggtcctcgtggtctccctggcccccctggtgcacctggtcctcaaggtttccaaggcccccctggtgaacctggcgagcctggcggttcaggtccaatgggtcccccaggtccccctggccctcctggcaagaacggagatgatggggaagctggtaagcctggccgccctggtgagcgtggacctcctggacctcagggtgctcgtggattgcctggaacagctggcctccccggaatgaagggacacagaggtttcagtggtttggatggtgccaaaggagatactggtcctgctggtcctaagggagagcctggcagtcctggtgaaaatggaactcccggccagatgggtccccgaggtctgcctggtgagagaggtcgccctggaccccctggcactgctggtgctcgtggtaacgatggtgctgtcggtgcagctgggccccccggtcccaccggccctactggccctcctggcttccctggtgcagctggtgctaagggtgaagctggtccccagggagcccgaggctctgaaggtccccagggtgtgcgtggtgagcccggaccccctggccctgctggtgctgctggtcctgctggaaaccctggtgctgatggacaacctggtgctaaaggtgccaatggtgctcctggtattgctggtgctcctggcttccctggtgcccgaggcccctctggacctcagggccccagcggcgctcctggtcccaagggaaccagtggtgaacctggtgcccctggcaacaaaggagacactggtgccaaaggagaacccggccctgctggagttcaaggtccccctggccctgctggagaagaaggaaaacgaggagcccgtggtgagcctggacctagcggcctgcccggacctcctggcgagcgcggtggacctggtagccgtggtttccctggtgctgatggtgttgctggccccaagggtccttctggtgaacgtggttctcctggccctgctggtcccaaaggttctcctggtgaagctggtcgccctggtgaagctggtctccctggtgccaagggtctcactggcagtcctggcagccctggtcctgatggcaaaaccggcccccctggtcccgctggtcaagatggtcgccctggacccgcaggtcctcctggagcccgtggacaggctggtgtgatgggattccctggacctaagggtactgctggagaacctggaaaggctggagagcgaggtgtccccggaccccctggcgctgttggtcccgctggcaaagatggcgaagctggagctcaaggagcccccggccctgctggtcctgctggtgagagaggtgaacaaggtcccgctggctcccctggattccagggtcttcctggtcccgctggtcctcctggtgaagcaggcaagcctggtgaacagggtgttcctggagaccttggtgcccctggaccctctggcgcaagaggcgagagaggtttccctggtgaacgtggtgtacaaggtcccccaggtcctgctggtccccgaggaaacaatggtgcccccggcaacgatggtgccaagggtgatactggtgcccccggagctcctggtagccagggtgcccccggtcttcagggaatgcctggtgaacgtggtgcagctggtcttccaggtcctaagggtgacagaggtgatgctggtcccaaaggtgctgatggttctcctggcaaagatggcgtccgtggtctgactggtcccattggtcctcctggccctgctggtgcccctggtgacaagggtgaagctggtcccagtggtcctgctggccccaccggagcccgtggtgcccccggagaccgtggtgaggctggtccccctggtcctgctggcttcgctggcccccctggtgctgatggccaacctggtgcgaaaggtgaacctggtgatactggtgtgaaaggtgacgctggtcctcctggccctgctggtcccgctggaccccctggccccattggtaacgttggtgctcctggacccaaaggttctcgtggtgctgctggtccccctggtgctactggtttccctggtgctgctggtcgtgttggtccccctggtccctctggaaatgctggaccccctggccctcccggtcccgttggcaaagaagggggcaaaggtccccgtggtgagactggtcccgctggacgtcctggtgaagttggtcccccaggtccccctggccctgctggtgagaaaggatctcctggtgctgatggacctgctggctctcctggtacccctggacctcagggtattgctggacagcgtggtgtggtcggtcttcccggtcagagaggaaaaagaggcttccctggtcttcctggaccctctggtgaacccggcaaacaaggtccttctggagcaagtggtgaacgtggtccccctggccctatgggcccccctggattggctggcccccctggtgaatctggtcgtgagggatcccctggtgctgaaggctcccctggaagagatggtgctcctggtgccaagggtgaccgtggtgagactggccctgctggcccccctggtgctcctggtgctcctggtgctcccggccctgttggtcctgctggcaagaatggcgaccgtggtgagactggtcctgctggtcctgctggtcccattggccctgctggtgcccgtggtcctgctggaccccaaggcccccgtggtgacaagggtgagacaggcgaacaaggtgacagaggcataaagggtcatcgtggcttctctggtctccagggtcctcctggctctcctggctctcctggtgaacaaggcccctctggagcttctggtcctgcaggtccccggggtccccctggctctgctggttctcctggcaaagatggactcaacggtctccctggccccattggtccccctggtcctcgaggtcgcactggcgatagtggtcctgctggtccccccggacctcctggaccccctggccctcccggtcctcccagcggtggttatgacttcagcttcctgcctcagccacctcaagagaagtctcaagatggtggccgttactaccgggccgatgatgccaacgtggtccgtgaccgtgaccttgaggtggacactaccctcaagagcctgagccagcagattgagaacatccgcagccctgagggcagccgcaagaaccccgcccgcacatgccgtgacctcaagatgtgccactctgactggaagagcggagagtactggatcgaccctaaccaaggctgcaacctggatgccatcaaggtctactgcaacatggagacaggtcagacctgtgtgttccccactcagccctctgtgcctcagaagaactggtacatcagcccaaaccccaaggagaaaaagcatgtctggtttggagagagcatgaccgatggattccagttcgagtatggaagcgaaggttccgatcctgccgatgtcgctatccagctgaccttcctgcgcctgatgtccaccgaggcctcccagaacatcacctatcactgcaagaacagcgtagcctacatggaccaacagactggcaacctcaagaagtccctgctcctccagggctccaacgagatcgagctcaggggcgaaggcaacagtcgattcacctacagcacgcttgtggatggctgcacgagtcacaccggaacttggggcaagacagtcatcgaatacaaaaccaccaagacctcccgcctgcccatcatcgatgtggctcccttggacattggtgccccagaccaggaattcggaatggacattggccctgcctgcttcgtgtaaactccctccatcccaatctggttccctcccacccagcccactttcccccaaccctggaaacagaccaacaacccaaactcaatttccccaaaagccaaaaattgggagacaatttcacatggactttggaaaacatttttttcctttgcattcatctctcaaacttagtttttatctttgaccaactgaacgtgaccaaaaaccaaaagtgcattcaaccttaccaaaaagaaaaaaaaataagaataaataaataactttttaaaaaaggaagcttggtcctcttgcttgaagacctatgtgggtataagtccctttctgcccactgggcttatgataccccaaatgctgccttttctgttcctttctccaccccctcttggggcctctcctccattgctccccaaatttaagtctcccccaaagacacaggaaataatgcattgtctgcccagccagcaaaggcaatgctgaatcgtcccaccagcccctcaacccccagcttacttccctacccagcaccttcaaatcctgccgggacattgggttctcggactattgaaggagcctaaccatctggcatctccatggcctctgcaacaaatccccacacacactttgtttttgagggcctgtgctgggggagccacctgcccctcgcaggggtttggagccaggcagggtcacagcagactggaaacatcggccacacatgtgcaggctgggtgggagagactgttctgttccttgtgtaattgtgttgctgaaagactacctcgttcttgtctttgtgtgtcaccggggcaactgtgtgggggcggggatgggggcagggtggcatcgcgcccagtttggtatcaaaggtgctacatctctgtgaaggggtggggtgggaaggaatttctggtgctatagaatctgagatgctcccctacaccagcaaatgttccttttgttcaaagtatttttttattctttttttttttttaatggatagggacttgtgtgaattttcttttcctgacggtgctatttaacaagggaggagagagtgccaactccagcctgctctctctctacccccctcttcactcttccagctcctgggcctatctgatgatctctctctcttctgaaaccctcccctcttgctgctgctccctaccctcagcttctctctctctctgtcctgcatcagggtttcagagcaccattttccaaagcacaaagcagtttttatccctggggtgggaggaagcaagagactctgtacctattttgtatgtgtataataatttgagatgtttttaattattttgattgctggcataaagcagggggaaatgatccagtccacag

SEQ ID NO: 1617 - DNA, 1121 bp, Rattus norvegicus
ggactccataccctttcctatctttaatggcaaaagaaatgactgggcacgaacgcctaaaccaaaactatgttttaaatctgtgttgggagagcgtgagagtgaatgtggattcaaaaataccttttctggaaacgtcgaaacattatcataacgtggaaaatcaagaatatgtaatcagatagatactcccattgtgaattttaaatattttaaagaatcgtctttaagactgtttagtggcagtgattgtctgtgctgtgggtcttaacttgtgatactaagtattaaatagctacgtttttcatgtatgtagatcatgcttttttgaaaaagcaaaacaatcaggtggcttttgcagttcaggaaattgaatgcagattttagcacagactgatttctttttcctttttaaatagctaggagctaaaactctaggggagaaggtaaaactagtttggatatgcaaaacatttattttgacataaaattgataaagatatttttaataatttacactgtaagcatgagtattttataatacactacagatatattgttagttcataacaatccatctacggatgtaacaactacaatgtgtagaggggttgatgctttggtcaatgaacctaaagaaaaatgaacaagttagatttttacaaagcccttttttataactcccaaaatttcttaaatctaaaaatgtctgcattattggaacaaacccattttaaatttgtaaatgaatattttttttaattttgaaaactttaattttttatacaaattaacgtatcatacaccaaacagtaacagaagtgattataataatggaagaaacagtttcttcaccaaatttccattcaagccacaaggctgtgtgtaagagaagtagaagtgatgtggtgtgactggctaggataaaggagatcttcaggagcacatgggtttagagagcccagggatcaggaaaaggaggctctcacatctgagcagtgctgtcctttcaaacacagcttggcttttatagtaacctaagaattaatgcatacaggaggagtttcacatgtgtgaaatccaatagcagatgggttaaagttaaacaagttatagcacag
